(19) United States
(12) Patent Application Publication
(10) Pub. No.: US 2024/0191176 A1
(43) Pub. Date: Jun. 13, 2024

(54) BACTERIA ENGINEERED TO SECRETE ACTIVE PROTEINS

(71) Applicant: Synlogic Operating Company, Inc., Cambridge, MA (US)

(72) Inventors: Aida Kalantari, Boston, MA (US); Douglas Kenny, Cambridge, MA (US); Analise Zaunbrecher Reeves, Cambridge, MA (US); Michael James, Melrose, MA (US); Mark Charbonneau, Cambridge, MA (US)

(21) Appl. No.: 18/286,661

(22) PCT Filed: Apr. 12, 2022
(86) PCT No.: PCT/US2022/024412

§ 371 Date: Oct. 12, 2023

Related U.S. Application Data
(60) Provisional application No. 63/174,349, filed on Apr. 13, 2021.
(60) Provisional application No. 63/210,903, filed on Jun. 15, 2021.

(51) Int. Cl. C12N 1/20; A61K 35/00; C07K 14/245; C07K 14/485; C12N 15/70; C12R 1/19

(52) U.S. Cl. CPC C12N 1/205; C07K 14/245; C07K 14/485; C12N 15/70; A61K 2035/11; C07K 2319/034; C12R 2001/19

(57) ABSTRACT

Recombinant bacteria capable of producing and secreting therapeutically active EGF, pharmaceutical compositions thereof, and methods of treating disorders are disclosed.

[0001] The present application claims the benefit of priority to U.S. Provisional Patent Application No. 63/174,349, filed Apr. 13, 2021, and U.S. Provisional Patent Application No. 63/210,903, filed Jun. 15, 2021, the contents of which are hereby incorporated by reference in their entireties.

### SEQUENCE LISTING

[0002] The instant application contains a Sequence Listing which has been submitted electronically in ASCII format and is hereby incorporated by reference in its entirety. Said ASCII copy, created on Sep. 18, 2020, is named 126046-03002_SL.txt and is 1,084,118 bytes in size.

### BACKGROUND

[0003] A growing body of scientific evidence suggests that probiotic bacteria are beneficial in the treatment or prevention of various diseases or disorders associated with the gut, including, for example, gastrointestinal disorders such as Crohn's disease and inflammatory bowel syndrome. More recently, recombinant bacteria have emerged as a potential new therapeutic treatment modality for gastrointestinal diseases and have also opened the field of bacterial therapies to a large number of other indications, including metabolic diseases, inflammatory diseases, and cancer. One benefit of recombinant bacteria is the ability to specifically target one or more disease mechanisms. For example, for gastrointestinal disorders, bacteria can be engineered to contain genes for the expression of anti-inflammatory agents or agents that aid in the healing of a disrupted gut-barrier, such as the short chain fatty acid butyrate, e.g., as described in International Patent Publication WO2016141108.

[0004] Additionally, bacterial therapies have the additional advantage that the size of the bacterial chromosome(s) allows for the insertion of gene(s) for the production and secretion of multiple effectors. Potential secreted polypeptides include signaling molecules, such as cytokines and growth factors, their receptors, and single chain antibodies directed against cell surface molecules, many of which have been proposed as are promising candidates for therapeutic interference in a wide range of indications.

[0005] A certain level of technical understanding of approaches to the secretion of heterologous proteins from bacteria can be gained from recombinant production strategies for therapeutic or other proteins. However, effective protocols for generation of recombinant bacteria which produce and secrete biologically active polypeptides in vivo have yet to be established.

[0006] Multiple conditions must be met for the successful secretion of effective amounts of biologically active polypeptides. In Gram-negative bacteria, secreted polypeptides have to cross the two membranes and a thin layer of peptidoglycan in the periplasmic space between the inner and outer lipid membranes. Type I, II, III, IV, and V secretion pathways are common among Gram-negative bacteria, and all of these pathways have been exploited for the secretion of recombinant proteins. However, given that secretion of a polypeptide across the inner and outer membranes of a gram-negative bacterium is complex, involving the execution of several steps and the use of different biological factors, a number of complications can arise. For example, problems include incomplete translocation across the inner membrane, insufficient capacity of the export machinery, and proteolytic degradation (Mergulhao et al., Biotechnology Advances 23 (2005) 177-202). In addition, the ability of a polypeptide to be secreted from a Gram-negative bacterium, such as E. coli, depends on the specific polypeptide to be secreted and the biochemical properties thereof, such as formation of correct disulfide bonds, size of protein or levels of expression.

[0007] Given the number of factors involved in secreting polypeptides from Gram-negative bacteria, in combination with factors arising from the different biological properties and characteristics of individual polypeptides, e.g., size, dimer formation, secondary and tertiary protein folding, and polypeptide expression levels, secretion of polypeptides from Gram-negative bacteria remains challenging. Further, even if successful secretion is achieved, the polypeptide is not always secreted in a biologically active form.

[0008] In view of the difficulties outlined here as well as others, there remains a need for engineering and methods for the successful secretion of biologically active polypeptides.

### SUMMARY

[0009] The instant disclosure relates to compositions of recombinant bacteria and methods for secreting therapeutically active epidermal growth factor (EGF) from recombinant bacteria for treatment of diseases or disorders. The recombinant bacteria disclosed herein are capable of high yield production of functionally active EGF molecules, which are secreted as therapeutically active EGF polypeptides.

[0010] In some embodiments, the recombinant bacteria are functionally silent until they reach an inducing environment, e.g., a mammalian gut, or the tumor microenvironment wherein expression of EGF is induced. In certain embodiments, the recombinant bacteria are naturally non-pathogenic and may be introduced into the gut in order to reduce gut inflammation and/or enhance gut barrier function and may thereby further ameliorate or prevent an autoimmune disorder. In some embodiments, the recombinant bacteria are tumor targeting and may be introduced into the tumor to stimulate the immune system, combat immune suppression or otherwise fight the cancer. In certain embodiments, the secreted EGF molecule is stably produced by the recombinant bacteria, and/or the recombinant bacteria are stably maintained in vivo and/or in vitro. The disclosure also provides pharmaceutical compositions comprising the recombinant bacteria. Methods of treating diseases are also provided.

[0011] In some embodiments, the recombinant bacteria produce EGF under the control of one or more promoters induced by an environmental condition, e.g., an environmental condition found in the mammalian gut, such as an inflammatory condition or a low oxygen condition. In some embodiments, the recombinant bacteria produce one or more therapeutic molecule(s) under the control of one or more promoters induced the tumor microenvironment. In non-limiting exemplary embodiments, the recombinant bacteria produce EGF under the control of an oxygen level-dependent promoter, a reactive oxygen species (ROS)-dependent promoter, a reactive nitrogen species (RNS)-dependent promoter, or a temperature sensitive promoter, and a corresponding transcription factor.

[0012] In some embodiments, the recombinant bacterium comprises one or more one gene(s) encoding one or more EGF polypeptides for secretion of an active polypeptide in vivo, wherein the one or more gene sequence(s) for producing the EGF polypeptide is operably linked to a directly or indirectly inducible promoter that is not associated with the gene(s) in nature. In some embodiments, the secretion tags are N terminally or C terminally fused to the EGF polypeptides. For example, the secretion tag may be covalently linked to the N terminus of the polypeptide through a peptide bond or polypeptide linker. Alternatively, the secretion tag may be covalently linked to the C terminus of the polypeptide through a peptide bond or polypeptide linker.

[0013] Non-limiting examples of contemplated secretion tags include PhoA, OmpF, ompA, cvaC, TorA, fdnG, dmsA, PelB, tolB, torT, dsbA, GltI, GspD, HdeB, MalE, mglB, OppA, PpiA, lamb, ECOLIN_05715, ECOLIN_16495, ECOLIN_19410, and ECOLIN_19880 secretion signals. In some embodiments, the secretion tag is cleaved after secretion into the extracellular environment. In some embodiments, the secretion tag is PhoA. In some embodiments, the secretion tag is ECOLIN 19410 secretion tag. In some embodiments, the secretion tag is GspD secretion tag. In some embodiments, the secretion tag is HdeB secretion tag. In some embodiments, the secretion tag is torT secretion tag.

[0014] In some embodiments, the recombinant bacteria further have one or more mutations or deletions in an outer membrane protein selected from lpp, nlP, tolA, and pal. In some embodiments, the fully or partially deleted or mutated outer membrane protein is pal. In some embodiments, the recombinant bacteria further encode a stabilizing polypeptide. In some embodiments, the EGF polypeptide is covalently fused to the stabilizing polypeptide through a peptide linker or a peptide bond.

[0015] In some embodiments, the C terminus of the EGF polypeptide is covalently fused to the N terminus of the stabilizing polypeptide through the peptide linker or peptide bond. In some embodiments, the N terminus of the EGF polypeptide is covalently fused to the C terminus of the stabilizing polypeptide through the peptide linker or peptide bond. In some embodiments, the stabilizing polypeptide comprises an immunoglobulin Fc polypeptide. In some embodiments, the immunoglobulin Fc polypeptide comprises at least a portion of an immunoglobulin heavy chain CH2 constant region. In some embodiments, the immunoglobulin Fc polypeptide comprises at least a portion of an immunoglobulin heavy chain CH3 constant region. In some embodiments, the immunoglobulin Fc polypeptide comprises at least a portion of an immunoglobulin heavy chain CH1 constant region. In some embodiments, the immunoglobulin Fc polypeptide comprises at least a portion of an immunoglobulin variable hinge region. In some embodiments, the immunoglobulin Fc polypeptide comprises at least a portion of an immunoglobulin variable hinge region, immunoglobulin heavy chain CH2 constant region and an immunoglobulin heavy chain CH3 constant region. In some embodiments, the immunoglobulin Fc polypeptide is a human IgA or human IgG Fc polypeptide. In some embodiments, the immunoglobulin Fc polypeptide is a human IgG Fc polypeptide. In some embodiments, the immunoglobulin Fc polypeptide is a human IgA polypeptide. In some embodiments, the linker comprises a glycine rich peptide. In some embodiments, the glycine rich peptide comprises the sequence [GlyGlyGlyGlySer]n where n is 1, 2, 3, 4, 5 or 6 (SEQ ID NO: 1053). In some embodiments, the glycine rich peptide comprises the sequence GGGGSGGGGSGGGGSGGGGS (SEQ ID NO: 509). In some embodiments, the linker comprises GGGGSGGGS (SEQ ID NO: 1054). In some embodiments, the stabilizing polypeptide has the ability to perform an effector function. In some embodiments, the stabilizing polypeptide is able to perform an anti-inflammatory effector function. In some embodiments, the stabilizing polypeptide is able to perform a pro-inflammatory effector function. In some embodiments, the stabilizing polypeptide is a cytokine.

[0016] In some embodiments, the stabilizing polypeptide is a multimer. In some embodiments, the stabilizing polypeptide is a dimer. In some embodiments, the gene sequences encoding the stabilizing polypeptide comprise a monomer and a second monomer, wherein the first and second monomer are covalently linked to each other through a peptide bond or a peptide linker.

[0017] In some embodiments, the gene sequences are located on a chromosome in the bacterium. In some embodiments, the gene sequences are located on a plasmid in the bacterium. In some embodiments, the bacterium is a probiotic bacterium. In some embodiments, the bacterium is a tumor targeting bacterium. In some embodiments, the bacterium is selected from the group consisting of Bacteroides, Bifidobacterium, Clostridium, Escherichia, Lactobacillus, and Lactococcus. In some embodiments, the bacterium is selected from Clostridium novyi NT, and Clostridium butyricum, and Bifidobacterium longum. In some embodiments, the bacterium is Escherichia coli strain Nissle. In some embodiments, the bacterium is an auxotroph in a gene that is complemented when the bacterium is present in a mammalian gut, e.g., an auxotroph in diaminopimelic acid or an enzyme in the thymine biosynthetic pathway. Pharmaceutically acceptable compositions comprising the bacteria and methods of treating or preventing disorders are also provided.

### BRIEF DESCRIPTION OF THE FIGURES

[0018] FIG. 1 depicts a schematic representation of an exemplary bacterium that secretes EGF linked to a signal peptide and under control of an FNR-inducible promoter (left) or a heat-inducible promoter that also expresses a TIS secretion pore (right).

[0019] FIG. 2A and FIG. 2B depict schematics of the gene organization of exemplary circuits of the disclosure for the expression of therapeutic polypeptides, which are secreted via a diffusible outer membrane (DOM) system. The therapeutic polypeptide of interest is fused to a prototypical N-terminal Sec-dependent secretion signal or Tat-dependent secretion signal, which is cleaved upon secretion into the periplasmic space. Exemplary secretion tags include sec-dependent PhoA, PelB, OmpF, OmpA, cvaC, and Tat-dependent tags (TorA, FdnG, DmsA). In certain embodiments, the recombinant bacteria comprise deletions in one or more of lpp, pal, tolA, and/or nlpI. Optionally, periplasmic proteases are also deleted, including, but not limited to, degP and ompT, e.g., to increase stability of the polypeptide in the periplasm. A FRT-KanR-FRT cassette is used for downstream integration. Expression is driven by a tet promoter (FIG. 2A) or an inducible promoter, such as oxygen level-dependent promoters (e.g., FNR-inducible promoter, FIG. 2B) or temperature sensitive promoters, promoters induced by inflammation or an inflammatory response (RNS, ROS promoters), and promoters induced by a metabolite that may or may not be naturally present (e.g., can be exogenously added) in the gut or the tumor microenvironment, e.g., arabinose.

[0020] FIG. 3 shows an ELISA of EGF secretion across three different EGF fusion proteins in two different bacterial backgrounds grown in either LB (left) or grown in 2YT (right).

[0021] FIG. 4 shows an ELISA of bioreactivity for secreted hEGF on pERK and pEGFR in HT-29 cells.

[0022] FIG. 5 shows a western blot of phosphorylated downstream targets of EGF after treatment with either EGF, different supernatants, or the presence of AG1478, an EGFR inhibitor.

[0023] FIG. 6 shows an ELISA of pEGFR with secreted EGF.

[0024] FIG. 7 shows an ELISA of pERK with secreted EGF.

[0025] FIG. 8 shows an in vitro activity assay for hEGF production (WT or Δpal/DOM grown in either LB or 2YT medium before induction (30° C.) and 4 hours after induction (37° C.)).

[0026] FIG. 9 shows the production of hEGF (pg/ml) in WT or Δpal/DOM grown 2YT media at timepoints of 0 hours, 4 hours after induction and overnight induction.

[0027] FIG. 10 shows the production of hEGF (ng/ml) in WT-CI-OmpA-EGF or Δpal/DOM-CI-OmpA-EGF at timepoints of before induction, 4 hours after induction and overnight induction.

[0028] FIGS. 11A and 11B depict a schematic (FIG. 11A) and a bar graph showing EGF production (FIG. 11B). FIG. 11A shows a schematic describing four EGF secreting prototype strains. FIG. 11B shows a graph demonstrating EGF production represented as μg EGF produced per 5×10\hat{ }11 cells in 8 hr (mean±SEM). Numbers 1-3 indicate three separate experiments.

[0029] FIG. 12 depicts a schematic showing EGF production and secretion by prototype strains over time.

[0030] FIGS. 13A and 13B depicts graphs showing prototype strain bioactivity. FIG. 13A depicts a graph showing representative pEGFR signal in the FRET assay in HT-29 cells after 5 mins stimulation across a range of EGF concentrations using rEGF standards or supernatants collected in one of three independent experiments. FIG. 13B depicts a graph showing EC50 (nM EGF) of pEGFR stimulation in HT-29 cells determined using rEGF standards or supernatants collected in three separate experiments. EC50 values are presented as mean±95% CI. Dashed lines indicate ±0.5 log fold-change from the mean of rEGF standards across all three experiments.

[0031] FIG. 14 depicts a chart showing EGF detected in colon effluent of naïve mice treated with the prototype strains (1e10 CFU) as indicated at a six-hour time point.

[0032] FIG. 15A-15E depict schematics and graphs relating to an in vivo study. FIG. 15A is a schematic outlining the study protocol. Mice received a single oral bolus of EcN WT (SYN094), A-Temp (SYN8062), A-FNR (SYN8063) at 1×10\hat{ }10 CFU. Strain abundance in tissue effluents (small intestine (FIG. 15B), cecum (FIG. 15C), colon (FIG. 15D) and feces (FIG. 15E) were collected and counted at indicated times. For each time point, data represent the average CFU per gram of sample determined from 5 mice samples±standard error of the mean.

[0033] FIG. 16A-16E depict graphs relating to an in vivo study in which mice were gavaged at 1×10\hat{ }10 CFU with prototype strains showing EGF secretion in the gastrointestinal contents of naïve mice (stomach effluent (FIG. 16A), small intestine effluent (FIG. 16B), cecum effluent (FIG. 16C), colon effluent (FIG. 16D) and feces (FIG. 16E).

[0034] FIG. 17A-17C depict graphs relating to an in vivo study in DSS treated mice. Mice received a single oral bolus of SYN8066 (Chassis B, FNR) and SYN8248 (Chassis B) at 1e10 CFU. Strain abundance in tissue (small intestine effluents (FIG. 17A), cecum effluents (FIG. 17B), and colon contents (FIG. 17C)) were collected and counted at indicated times. For each time point, data represent the average CFU per gram of sample determined from 5 mice samples.

[0035] FIG. 18A-18C depict graphs relating to an in vivo study in which DSS treated mice were gavaged at 1e10 CFU with prototype strains showing EGF secretion in the gastrointestinal contents of DSS mice (small intestine effluent (FIG. 18A), cecum effluent (FIG. 18B), and colon contents (FIG. 18C).

[0036] FIG. 19 depicts a bar graph showing in vitro EGF production activity of strains SYN8371, SYN8408, and SYN8510 having 1, 2, or 3 integrated copies, respectively of FNR-ompA-EGF, as compared to the plasmid strain SYN8066 having the same construct.

### DETAILED DESCRIPTION

[0037] The present disclosure relates to compositions of recombinant bacteria and methods for secreting EGF from recombinant bacteria for treatment of diseases or disorders. The recombinant bacteria disclosed herein are capable of high yield production of functionally active EGF, which is secreted as therapeutically active polypeptide.

### Definitions

[0038] In order that the disclosure may be more readily understood, certain terms are first defined. These definitions should be read in light of the remainder of the disclosure and as understood by a person of ordinary skill in the art. Unless defined otherwise, all technical and scientific terms used herein have the same meaning as commonly understood by a person of ordinary skill in the art. Additional definitions are set forth throughout the detailed description.

[0039] As used herein, the term “EGF” is used to encompass human, murine, and other species and sources of EGF polypeptides and polynucleotides, including naturally occurring EGF (e.g., naturally occurring EGF isoforms) and non-naturally occurring EGF (e.g., synthetic or engineered variants of EGF). Exemplary EGF sequences are known in the art. See, e.g., Dube et al., Epidermal growth factor receptor inhibits colitis-associated cancer in mice, J Clin Invest 2012; Sinha et al., Epidermal Growth Factor Enemas with Oral Mesalamine for Mild-to-Moderate Left-Sided Ulcerative Colitis or Proctitis, N Engl J Med 2003; Yu et al., Nononcogenic restoration of the intestinal barrier by E. coli-delivered human EGF, JCI Insight 2019; US20200299702A1; WO2013009103A2; the contents of which are hereby incorporated by reference in their entireties.

[0040] In some embodiments, a human EGF polypeptide comprises Sequence A (below), a functional fragment and/or variant thereof, or a polypeptide having at least 80%, 85%, 90%, 95%, 96%, 97%, 98%, or 99% identity to Sequence A or a functional fragment and/or variant thereof, e.g., as assessed by an alignment algorithm such as NCBI BLAST. A human EGF polynucleotide encodes a human EGF polypeptide. A non-limiting example of a human EGF polynucleotide comprises Sequence B.

Sequence A (human EGF):
NSDSECPLSHDGYCLHDGVCMYIEALDKYACNCVVGYIGERCQYRDLKWW
ELR
Sequence B (human EGF):
AATAGTGACAGCGAATGTCCGCTGTCGCACGATGGTTATTGCCTTCATGA
TGGGGTGTGCATGTACATTGAGGCATTGGACAAATATGCCTGCAACTGTG
TTGTCGGCTATATCGGCGAACGGTGTCAGTACCGTGATCTGAAATGGTGG
GAATTACGCTAA

[0041] As used herein, the term “recombinant microorganism” refers to a microorganism, e.g., bacterial, yeast, or viral cell, or bacteria, yeast, or virus, that has been genetically modified from its native state. Thus, a “recombinant bacterial cell” or “recombinant bacteria” refers to a bacterial cell or bacteria that have been genetically modified from their native state. For instance, a recombinant bacterial cell may have nucleotide insertions, nucleotide deletions, nucleotide rearrangements, and nucleotide modifications introduced into their DNA. These genetic modifications may be present in the chromosome of the bacteria or bacterial cell, or on a plasmid in the bacteria or bacterial cell. Recombinant bacterial cells disclosed herein may comprise exogenous nucleotide sequences on plasmids. Alternatively, recombinant bacterial cells may comprise exogenous nucleotide sequences stably incorporated into their chromosome.

[0042] A “programmed or engineered microorganism” refers to a microorganism, e.g., bacterial or viral cell, or bacteria or virus, that has been genetically modified from its native state to perform a specific function. Thus, a “programmed or engineered bacterial cell” or “programmed or engineered bacteria” refers to a bacterial cell or bacteria that has been genetically modified from its native state to perform a specific function. In certain embodiments, the programmed or engineered bacterial cell has been modified to express one or more proteins, for example, one or more EGF proteins that have a therapeutic activity or serve a therapeutic purpose. The programmed or engineered bacterial cell may additionally have the ability to stop growing or to destroy itself once EGF has been expressed.

[0043] As used herein, the term “gene” refers to a nucleic acid fragment that encodes a protein or fragment thereof, optionally including regulatory sequences preceding (5′ non-coding sequences) and following (3′ non-coding sequences) the coding sequence. In one embodiment, a “gene” does not include regulatory sequences preceding and following the coding sequence. A “native gene” refers to a gene as found in nature, optionally with its own regulatory sequences preceding and following the coding sequence. A “chimeric gene” refers to any gene that is not a native gene, optionally comprising regulatory sequences preceding and following the coding sequence, wherein the coding sequences and/or the regulatory sequences, in whole or in part, are not found together in nature. Thus, a chimeric gene may comprise regulatory sequences and coding sequences that are derived from different sources, or regulatory and coding sequences that are derived from the same source, but arranged differently than is found in nature.

[0044] As used herein, the term “gene sequence” is meant to refer to a genetic sequence, e.g., a nucleic acid sequence. The gene sequence or genetic sequence is meant to include a complete gene sequence or a partial gene sequence. The gene sequence or genetic sequence is meant to include sequence that encodes a protein or polypeptide and is also meant to include genetic sequence that does not encode a protein or polypeptide, e.g., a regulatory sequence, leader sequence, signal sequence, or other non-protein coding sequence.

[0045] In some embodiments, the term EGF “gene” or “gene sequence” is meant to refer to a nucleic acid sequence encoding an EGF effector polypeptide described herein. The nucleic acid sequence may comprise the entire gene sequence or a partial gene sequence encoding a functional molecule. The nucleic acid sequence may be a natural sequence or a synthetic sequence. The nucleic acid sequence may comprise a native or wild-type sequence or may comprise a modified sequence having one or more insertions, deletions, substitutions, or other modifications, for example, the nucleic acid sequence may be codon-optimized.

[0046] As used herein, a “heterologous” gene or “heterologous sequence” refers to a nucleotide sequence that is not normally found in a given cell in nature. As used herein, a heterologous sequence encompasses a nucleic acid sequence that is exogenously introduced into a given cell and can be a native sequence (naturally found or expressed in the cell) or non-native sequence (not naturally found or expressed in the cell) and can be a natural or wild-type sequence or a variant, non-natural, or synthetic sequence. “Heterologous gene” includes a native gene, or fragment thereof, that has been introduced into the host cell in a form that is different from the corresponding native gene. For example, a heterologous gene may include a native coding sequence that is a portion of a chimeric gene to include non-native regulatory regions that is reintroduced into the host cell. A heterologous gene may also include a native gene, or fragment thereof, introduced into a non-native host cell. Thus, a heterologous gene may be foreign or native to the recipient cell; a nucleic acid sequence that is naturally found in a given cell but expresses an unnatural amount of the nucleic acid and/or the polypeptide which it encodes; and/or two or more nucleic acid sequences that are not found in the same relationship to each other in nature. As used herein, the term “endogenous gene” refers to a native gene in its natural location in the genome of an organism. As used herein, the term “transgene” refers to a gene that has been introduced into the host organism, e.g., host bacterial cell, genome.

[0047] As used herein, a “non-native” nucleic acid sequence refers to a nucleic acid sequence not normally present in a microorganism, e.g., an extra copy of an endogenous sequence, or a heterologous sequence such as a sequence from a different species, strain, or substrain of bacteria or virus, or a sequence that is modified and/or mutated as compared to the unmodified sequence from bacteria or virus of the same subtype. In some embodiments, the non-native nucleic acid sequence is a synthetic, non-naturally occurring sequence (see, e.g., Purcell et al., 2013). The non-native nucleic acid sequence may be a regulatory region, a promoter, a gene, and/or one or more genes in gene cassette. In some embodiments, “non-native” refers to two or more nucleic acid sequences that are not found in the same relationship to each other in nature. The non-native nucleic acid sequence may be present on a plasmid or chromosome. In some embodiments, the genetically engineered microorganism of the disclosure comprises a gene that is operably linked to a promoter that is not associated with said gene in nature. For example, in some embodiments, the recombinant bacteria disclosed herein comprise a gene that is operably linked to a directly or indirectly inducible promoter that is not associated with said gene in nature, e.g., an FNR responsive promoter (or other promoter disclosed herein) operably linked to EGF.

[0048] As used herein, the term “coding region” refers to a nucleotide sequence that codes for a specific amino acid sequence. The term “regulatory sequence” refers to a nucleotide sequence located upstream (5′ non-coding sequences), within, or downstream (3′ non-coding sequences) of a coding sequence, and which influences the transcription, RNA processing, RNA stability, or translation of the associated coding sequence. Examples of regulatory sequences include, but are not limited to, promoters, translation leader sequences, effector binding sites, signal sequences, and stem-loop structures. In one embodiment, the regulatory sequence comprises a promoter, e.g., an FNR responsive promoter or other promoter disclosed herein.

[0049] As used herein, a “gene cassette” or “operon” encoding a biosynthetic pathway refers to the two or more genes for the production of an effector molecule such as EGF. In addition to encoding a set of genes capable of producing said molecule, the gene cassette or operon may also comprise additional transcription and translation elements, e.g., a ribosome binding site.

[0050] A regulatory region “operably linked” refers to the association of nucleic acid sequences on a single nucleic acid fragment so that the function of one is affected by the other. A regulatory element is operably linked with a coding sequence when it is capable of affecting the expression of the gene coding sequence, regardless of the distance between the regulatory element and the coding sequence. More specifically, operably linked refers to a nucleic acid sequence, e.g., a gene encoding EGF, that is joined to a regulatory sequence in a manner which allows expression of the nucleic acid sequence, e.g., the gene encoding the EGF molecule described herein. In other words, the regulatory sequence acts in cis. In one embodiment, a gene may be “directly linked” to a regulatory sequence in a manner which allows expression of the gene. In another embodiment, a gene may be “indirectly linked” to a regulatory sequence in a manner which allows expression of the gene. In one embodiment, two or more genes may be directly or indirectly linked to a regulatory sequence in a manner which allows expression of the two or more genes.

A regulatory region or sequence is a nucleic acid that can direct transcription of an EGF gene and may comprise promoter sequences, enhancer sequences, response elements, protein recognition sites, inducible elements, promoter control elements, protein binding sequences, 5′ and 3′ untranslated regions, transcriptional start sites, termination sequences, polyadenylation sequences and introns.

[0051] A “promoter” as used herein, refers to a nucleotide sequence that is capable of controlling the expression of a coding sequence or gene. Promoters are generally located 5′ of the sequence that they regulate. Promoters may be derived in their entirety from a native gene, or be composed of different elements derived from promoters found in nature, and/or comprise synthetic nucleotide segments. Those skilled in the art will readily ascertain that different promoters may regulate expression of a coding sequence or gene in response to a particular stimulus, e.g., in a cell- or tissue-specific manner, in response to different environmental or physiological conditions, or in response to specific compounds. Prokaryotic promoters are typically classified into two classes: inducible and constitutive. A “constitutive promoter” refers to a promoter that allows for continual transcription of the coding sequence or gene under its control.

[0052] “Constitutive promoter” refers to a promoter that is capable of facilitating continuous transcription of a coding sequence or gene under its control and/or to which it is operably linked. Constitutive promoters and variants are well known in the art and include, but are not limited to, Ptac promoter, BBa_J23100, a constitutive Escherichia coli σS promoter (e.g., an osmY promoter (International Genetically Engineered Machine (iGEM) Registry of Standard Biological Parts Name BBa_J45992; BBa_J45993)), a constitutive Escherichia coli σ32 promoter (e.g., htpG heat shock promoter (BBa_J45504)), a constitutive Escherichia coli σ70 promoter (e.g., lacq promoter (BBa_J54200; BBa_J56015), E. coli CreABCD phosphate sensing operon promoter (BBa_J64951), GlnRS promoter (BBa_K088007), lacZ promoter (BBa_K119000; BBa_K119001); M13K07 gene I promoter (BBa_M13101); M13K07 gene II promoter (BBa_M13102), M13K07 gene III promoter (BBa_M13103), M13K07 gene IV promoter (BBa_M13104), M13K07 gene V promoter (BBa_M13105), M13K07 gene VI promoter (BBa_M13106), M13K07 gene VIII promoter (BBa_M13108), M13110 (BBa_M13110)), a constitutive Bacillus subtilis σA promoter (e.g., promoter veg (BBa_K143013), promoter 43 (BBa_K143013), PliaG (BBa_K823000), PlepA (BBa_K823002), Pveg (BBa_K823003)), a constitutive Bacillus subtilis σB promoter (e.g., promoter ctc (BBa_K143010), promoter gsiB (BBa_K143011)), a Salmonella promoter (e.g., Pspv2 from Salmonella (BBa_K112706), Pspv from Salmonella (BBa_K112707)), a bacteriophage T7 promoter (e.g., T7 promoter (BBa 1712074; BBa_1719005; BBa_J34814; BBa_J64997; BBa_K113010; BBa_K113011; BBa_K113012; BBa_R0085; BBa_R0180; BBa_R0181; BBa_R0182; BBa_R0183; BBa_Z0251; BBa_Z0252; BBa_Z0253)), and a bacteriophage SP6 promoter (e.g., SP6 promoter (BBa_J64998)).

[0053] An “inducible promoter” refers to a regulatory region that is operably linked to one or more genes, wherein expression of the gene(s) is increased in the presence of an inducer of said regulatory region. An “inducible promoter” refers to a promoter that initiates increased levels of transcription of the coding sequence or gene under its control in response to a stimulus or an exogenous environmental condition. A “directly inducible promoter” refers to a regulatory region, wherein the regulatory region is operably linked to a gene encoding a protein or polypeptide, where, in the presence of an inducer of said regulatory region, the protein or polypeptide is expressed. An “indirectly inducible promoter” refers to a regulatory system comprising two or more regulatory regions, for example, a first regulatory region that is operably linked to a first gene encoding a first protein, polypeptide, or factor, e.g., a transcriptional regulator, which is capable of regulating a second regulatory region that is operably linked to a second gene, the second regulatory region may be activated or repressed, thereby activating or repressing expression of the second gene. Both a directly inducible promoter and an indirectly inducible promoter are encompassed by “inducible promoter.”

[0054] As used herein, “stably maintained” or “stable” bacterium is used to refer to a bacterial host cell carrying non-native genetic material, e.g., a gene encoding one or more EGF molecule(s), which is incorporated into the host genome or propagated on a self-replicating extra-chromosomal plasmid, such that the non-native genetic material is retained, expressed, and propagated. The stable bacterium is capable of survival and/or growth in vitro, e.g., in medium, and/or in vivo, e.g., in the gut. For example, the stable bacterium may be a recombinant bacterium comprising a gene encoding a encoding a payload, e.g., one or more EGF molecule(s), in which the plasmid or chromosome carrying the gene is stably maintained in the bacterium, such that the payload can be expressed in the bacterium, and the bacterium is capable of survival and/or growth in vitro and/or in vivo. In some embodiments, copy number affects the stability of expression of the non-native genetic material. In some embodiments, copy number affects the level of expression of the non-native genetic material.

[0055] As used herein, the term “expression” refers to the transcription and stable accumulation of sense (mRNA) or anti-sense RNA derived from a nucleic acid, and/or to translation of an mRNA into a polypeptide.

[0056] As used herein, the term “plasmid” or “vector” refers to an extrachromosomal nucleic acid, e.g., DNA, construct that is not integrated into a bacterial cell's genome. Plasmids are usually circular and capable of autonomous replication. Plasmids may be low-copy, medium-copy, or high-copy, as is well known in the art. Plasmids may optionally comprise a selectable marker, such as an antibiotic resistance gene, which helps select for bacterial cells containing the plasmid and which ensures that the plasmid is retained in the bacterial cell. A plasmid disclosed herein may comprise a nucleic acid sequence encoding a heterologous gene, e.g., a gene encoding EGF molecule.

[0057] As used herein, the term “transform” or “transformation” refers to the transfer of a nucleic acid fragment into a host bacterial cell, resulting in genetically-stable inheritance. Host bacterial cells comprising the transformed nucleic acid fragment are referred to as “recombinant” or “transgenic” or “transformed” organisms.

[0058] The term “genetic modification,” as used herein, refers to any genetic change. Exemplary genetic modifications include those that increase, decrease, or abolish the expression of a gene, including, for example, modifications of native chromosomal or extrachromosomal genetic material. Exemplary genetic modifications also include the introduction of at least one plasmid, modification, mutation, base deletion, base addition, base substitution, and/or codon modification of chromosomal or extrachromosomal genetic sequence(s), gene over-expression, gene amplification, gene suppression, promoter modification or substitution, gene addition (either single or multi-copy), antisense expression or suppression, or any other change to the genetic elements of a host cell, whether the change produces a change in phenotype or not. Genetic modification can include the introduction of a plasmid, e.g., a plasmid comprising EGF operably linked to a promoter, into a bacterial cell. Genetic modification can also involve a targeted replacement in the chromosome, e.g., to replace a native gene promoter with an inducible promoter, regulated promoter, strong promoter, or constitutive promoter. Genetic modification can also involve gene amplification, e.g., introduction of at least one additional copy of a native gene into the chromosome of the cell. Alternatively, chromosomal genetic modification can involve a genetic mutation.

[0059] As used herein, the term “genetic mutation” refers to a change or changes in a nucleotide sequence of a gene or related regulatory region that alters the nucleotide sequence as compared to its native or wild-type sequence. Mutations include, for example, substitutions, additions, and deletions, in whole or in part, within the wild-type sequence. Such substitutions, additions, or deletions can be single nucleotide changes (e.g., one or more point mutations), or can be two or more nucleotide changes, which may result in substantial changes to the sequence. Mutations can occur within the coding region of the gene as well as within the non-coding and regulatory sequence of the gene. The term “genetic mutation” is intended to include silent and conservative mutations within a coding region as well as changes which alter the amino acid sequence of the polypeptide encoded by the gene. A genetic mutation in a gene coding sequence may, for example, increase, decrease, or otherwise alter the activity (e.g., enzymatic activity) of the gene's polypeptide product. A genetic mutation in a regulatory sequence may increase, decrease, or otherwise alter the expression of sequences operably linked to the altered regulatory sequence.

[0060] As used herein, the term “transporter” is meant to refer to a mechanism, e.g., protein, proteins, or protein complex, for importing a molecule, e.g., amino acid, peptide (di-peptide, tri-peptide, polypeptide, etc.), toxin, metabolite, substrate, as well as other biomolecules into the microorganism from the extracellular milieu.

[0061] As used herein, the phrase “exogenous environmental condition” or “exogenous environment signal” refers to settings, circumstances, stimuli, or biological molecules under which a promoter described herein is directly or indirectly induced. The phrase “exogenous environmental conditions” is meant to refer to the environmental conditions external to the engineered microorganism, but endogenous or native to the host subject environment. Thus, “exogenous” and “endogenous” may be used interchangeably to refer to environmental conditions in which the environmental conditions are endogenous to a mammalian body, but external or exogenous to an intact microorganism cell. In some embodiments, the exogenous environmental conditions are specific to the gut of a mammal. In some embodiments, the exogenous environmental conditions are specific to the upper gastrointestinal tract of a mammal. In some embodiments, the exogenous environmental conditions are specific to the lower gastrointestinal tract of a mammal. In some embodiments, the exogenous environmental conditions are specific to the small intestine of a mammal. In some embodiments, the exogenous environmental conditions are specific to the tumor microenvironment. In some embodiments, the exogenous environmental conditions are low-oxygen, microaerobic, or anaerobic conditions, such as the environment of the mammalian gut or the tumor microenvironment. In some embodiments, exogenous environmental conditions are molecules or metabolites that are specific to the mammalian gut, e.g., propionate. In some embodiments, the exogenous environmental condition is a tissue-specific or disease-specific metabolite or molecule(s). In some embodiments, the exogenous environmental condition is specific to an inflammatory disease. In some embodiments, the exogenous environmental condition is a low-pH environment. In some embodiments, the genetically engineered microorganism of the disclosure comprises a pH-dependent promoter. In some embodiments, the genetically engineered microorganism of the disclosure comprises an oxygen level-dependent promoter. In some aspects, bacteria have evolved transcription factors that are capable of sensing oxygen levels. Different signaling pathways may be triggered by different oxygen levels and occur with different kinetics. An “oxygen level-dependent promoter” or “oxygen level-dependent regulatory region” refers to a nucleic acid sequence to which one or more oxygen level-sensing transcription factors is capable of binding, wherein the binding and/or activation of the corresponding transcription factor activates downstream gene expression.

[0062] Examples of oxygen level-dependent transcription factors include, but are not limited to, FNR (fumarate and nitrate reductase), ANR (anaerobic nitrate respiration), and DNR (dissimilatory nitrate respiration regulator). Corresponding FNR-responsive promoters, ANR-responsive promoters, and DNR-responsive promoters are known in the art (see, e.g., Castiglione et al., 2009; Eiglmeier et al., 1989; Galimand et al., 1991; Hasegawa et al., 1998; Hoeren et al., 1993; Salmon et al., 2003), and non-limiting examples are shown in Table 1.

[0063] In a non-limiting example, a promoter (PfnrS) was derived from the E. coli Nissle fumarate and nitrate reductase gene S (fnrS) that is known to be highly expressed under conditions of low or no environmental oxygen (Durand and Storz, 2010; Boysen et al, 2010). The PfnrS promoter is activated under anaerobic conditions by the global transcriptional regulator FNR that is naturally found in Nissle. Under anaerobic conditions, FNR forms a dimer and binds to specific sequences in the promoters of specific genes under its control, thereby activating their expression. However, under aerobic conditions, oxygen reacts with iron-sulfur clusters in FNR dimers and converts them to an inactive form. In this way, the PfnrS inducible promoter is adopted to modulate the expression of proteins or RNA. PfnrS is used interchangeably in this application as FNRS, fnrs, FNR, P-FNRS promoter and other such related designations to indicate the promoter PfnrS.

TABLE 1
Examples of transcription factors and
responsive genes and regulatory regions

| | Examples of responsive genes, promoters, |
|---|---|
| Transcription Factor | and/or regulatory regions: |
| FNR | nirB, ydfZ, pdhR, focA, ndH, hlyE, narK, |
| | narX, narG, yfiD, tdcD |
| ANR | arcDABC |
| DNR | norb, norC |

[0064] As used herein, a “tunable regulatory region” refers to a nucleic acid sequence under direct or indirect control of a transcription factor and which is capable of activating, repressing, derepressing, or otherwise controlling gene expression relative to levels of an inducer. In some embodiments, the tunable regulatory region comprises a promoter sequence. The inducer may be RNS, or other inducer described herein, and the tunable regulatory region may be a RNS-responsive regulatory region or other responsive regulatory region described herein. The tunable regulatory region may be operatively linked to a gene sequence(s) or gene cassette for the production of one or more payloads, e.g., EGF gene cassette or gene sequence(s). For example, in one specific embodiment, the tunable regulatory region is a RNS-derepressible regulatory region, and when RNS is present, a RNS-sensing transcription factor no longer binds to and/or represses the regulatory region, thereby permitting expression of the operatively linked gene or gene cassette. In this instance, the tunable regulatory region derepresses gene or gene cassette expression relative to RNS levels. Each gene or gene cassette may be operatively linked to a tunable regulatory region that is directly or indirectly controlled by a transcription factor that is capable of sensing at least one RNS.

[0065] In some embodiments, the exogenous environmental conditions are the presence or absence of reactive oxygen species (ROS). In other embodiments, the exogenous environmental conditions are the presence or absence of reactive nitrogen species (RNS). In some embodiments, exogenous environmental conditions are biological molecules that are involved in the inflammatory response, for example, molecules present in an inflammatory disorder of the gut. In some embodiments, the exogenous environmental conditions or signals exist naturally or are naturally absent in the environment in which the recombinant bacterial cell resides. In some embodiments, the exogenous environmental conditions or signals are artificially created, for example, by the creation or removal of biological conditions and/or the administration or removal of biological molecules.

[0066] In some embodiments, the exogenous environmental condition(s) and/or signal(s) stimulates the activity of an inducible promoter. In some embodiments, the exogenous environmental condition(s) and/or signal(s) that serves to activate the inducible promoter is not naturally present within the gut or any other organ of a mammal. In some embodiments, the inducible promoter is stimulated by a molecule or metabolite that is administered in combination with the pharmaceutical composition of the disclosure, for example, tetracycline, arabinose, or any biological molecule that serves to activate an inducible promoter. In some embodiments, the exogenous environmental condition(s) and/or signal(s) is added to culture media comprising a recombinant bacterial cell of the disclosure. In some embodiments, the exogenous environmental condition that serves to activate the inducible promoter is naturally present within the gut of a mammal (for example, low oxygen or anaerobic conditions, or biological molecules involved in an inflammatory response). In some embodiments, the molecule that activates the inducible promoter is present in the tumor microenvironment. In some embodiments, the loss of exposure to an exogenous environmental condition (for example, in vivo) inhibits the activity of an inducible promoter, as the exogenous environmental condition is not present to induce the promoter (for example, an aerobic environment outside the gut). “Gut” refers to the organs, glands, tracts, and systems that are responsible for the transfer and digestion of food, absorption of nutrients, and excretion of waste. In humans, the gut comprises the gastrointestinal (GI) tract, which starts at the mouth and ends at the anus, and additionally comprises the esophagus, stomach, small intestine, and large intestine. The gut also comprises accessory organs and glands, such as the spleen, liver, gallbladder, and pancreas. The upper gastrointestinal tract comprises the esophagus, stomach, and duodenum of the small intestine. The lower gastrointestinal tract comprises the remainder of the small intestine, i.e., the jejunum and ileum, and all of the large intestine, i.e., the cecum, colon, rectum, and anal canal. Bacteria can be found throughout the gut, e.g., in the gastrointestinal tract, and particularly in the intestines.

[0067] “Hypoxia” is used to refer to reduced oxygen supply to a tissue as compared to physiological levels, thereby creating an oxygen-deficient environment. “Normoxia” refers to a physiological level of oxygen supply to a tissue. Hypoxia is a hallmark of solid tumors and characterized by regions of low oxygen and necrosis due to insufficient perfusion.

[0068] As used herein, the term “low oxygen” is meant to refer to a level, amount, or concentration of oxygen (O₂) that is lower than the level, amount, or concentration of oxygen that is present in the atmosphere (e.g., <21% O₂; <160 torr O₂)). Thus, the term “low oxygen condition or conditions” or “low oxygen environment” refers to conditions or environments containing lower levels of oxygen than are present in the atmosphere. In some embodiments, the term “low oxygen” is meant to refer to the level, amount, or concentration of oxygen (O₂) found in a mammalian gut, e.g., lumen, stomach, small intestine, duodenum, jejunum, ileum, large intestine, cecum, colon, distal sigmoid colon, rectum, and anal canal. In some embodiments, the term “low oxygen” is meant to refer to a level, amount, or concentration of O₂ that is 0-60 mmHg O₂ (0-60 torr O₂) (e.g., 0, 1, 2, 3, 4, 5, 6, 7, 8, 9, 10, 11, 12, 13, 14, 15, 16, 17, 18, 19, 20, 21, 22, 23, 24, 25, 26, 27, 28, 29, 30, 31, 32, 33, 34, 35, 36, 37, 38, 39, 40, 41, 42, 43, 44, 45, 46, 47, 48, 49, 50, 51, 52, 53, 54, 55, 56, 57, 58, 59, and 60 mmHg O₂), including any and all incremental fraction(s) thereof (e.g., 0.2 mmHg, 0.5 mmHg O₂, 0.75 mmHg O₂, 1.25 mmHg O₂, 2.175 mmHg O₂, 3.45 mmHg O₂, 3.75 mmHg O₂, 4.5 mmHg O₂, 6.8 mmHg O₂, 11.35 mmHg 02, 46.3 mmHg O₂, 58.75 mmHg, etc., which exemplary fractions are listed here for illustrative purposes and not meant to be limiting in any way). In some embodiments, “low oxygen” refers to about 60 mmHg O₂ or less (e.g., 0 to about 60 mmHg O₂). The term “low oxygen” may also refer to a range of O₂ levels, amounts, or concentrations between 0-60 mmHg O₂ (inclusive), e.g., 0-5 mmHg O₂, <1.5 mmHg O₂, 6-10 mmHg, <8 mmHg, 47-60 mmHg, etc. which listed exemplary ranges are listed here for illustrative purposes and not meant to be limiting in any way. See, for example, Albenberg et al., Gastroenterology, 147(5): 1055-1063 (2014); Bergofsky et al., J Clin. Invest., 41(11): 1971-1980 (1962); Crompton et al., J Exp. Biol., 43: 473-478 (1965); He et al., PNAS (USA), 96: 4586-4591 (1999); McKeown, Br. J. Radiol., 87:20130676 (2014) (doi: 10.1259/brj.20130676), each of which discusses the oxygen levels found in the mammalian gut of various species and each of which are incorportated by reference herewith in their entireties. In some embodiments, the term “low oxygen” is meant to refer to the level, amount, or concentration of oxygen (O₂) found in a mammalian organ or tissue other than the gut, e.g., urogenital tract, tumor tissue, etc. in which oxygen is present at a reduced level, e.g., at a hypoxic or anoxic level. In some embodiments, “low oxygen” is meant to refer to the level, amount, or concentration of oxygen (O₂) present in partially aerobic, semi aerobic, microaerobic, nanoaerobic, microoxic, hypoxic, anoxic, and/or anaerobic conditions. For example, Table 2 summarizes the amount of oxygen present in various organs and tissues. In some embodiments, the level, amount, or concentration of oxygen (O₂) is expressed as the amount of dissolved oxygen (“DO”) which refers to the level of free, non-compound oxygen (O₂) present in liquids and is typically reported in milligrams per liter (mg/L), parts per million (ppm; 1 mg/L=1 ppm), or in micromoles (umole) (1 umole O₂=0.022391 mg/L O₂). Fondriest Environmental, Inc., “Dissolved Oxygen”, Fundamentals of Environmental Measurements, 19 Nov. 2013, www.fondriest.com/environmental-measurements/parameters/water-quality/dissolved-oxygen>. In some embodiments, the term “low oxygen” is meant to refer to a level, amount, or concentration of oxygen (O₂) that is about 6.0 mg/L DO or less, e.g., 6.0 mg/L, 5.0 mg/L, 4.0 mg/L, 3.0 mg/L, 2.0 mg/L, 1.0 mg/L, or 0 mg/L, and any fraction therein, e.g., 3.25 mg/L, 2.5 mg/L, 1.75 mg/L, 1.5 mg/L, 1.25 mg/L, 0.9 mg/L, 0.8 mg/L, 0.7 mg/L, 0.6 mg/L, 0.5 mg/L, 0.4 mg/L, 0.3 mg/L, 0.2 mg/L and 0.1 mg/L DO, which exemplary fractions are listed here for illustrative purposes and not meant to be limiting in any way. The level of oxygen in a liquid or solution may also be reported as a percentage of air saturation or as a percentage of oxygen saturation (the ratio of the concentration of dissolved oxygen (O₂) in the solution to the maximum amount of oxygen that will dissolve in the solution at a certain temperature, pressure, and salinity under stable equilibrium). Well-aerated solutions (e.g., solutions subjected to mixing and/or stirring) without oxygen producers or consumers are 100% air saturated. In some embodiments, the term “low oxygen” is meant to refer to 40% air saturation or less, e.g., 40%, 39%, 38%, 37%, 36%, 35%, 34%, 33%, 32%, 31%, 30%, 29%, 28%, 27%, 26%, 25%, 24%, 23%, 22%, 21%, 20%, 19%, 18%, 17%, 16%, 15%, 14%, 13%, 12%, 11%, 10%, 9%, 8%, 7%, 6%, 5%, 4%, 3%, 2%, 1%, and 0% air saturation, including any and all incremental fraction(s) thereof (e.g., 30.25%, 22.70%, 15.5%, 7.7%, 5.0%, 2.8%, 2.0%, 1.65%, 1.0%, 0.9%, 0.8%, 0.75%, 0.68%, 0.5%. 0.44%, 0.3%, 0.25%, 0.2%, 0.1%, 0.08%, 0.075%, 0.058%, 0.04%. 0.032%, 0.025%, 0.01%, etc.) and any range of air saturation levels between 0-40%, inclusive (e.g., 0-5%, 0.05-0.1%, 0.1-0.2%, 0.1-0.5%, 0.5-2.0%, 0-10%, 5-10%, 10-15%, 15-20%, 20-25%, 25-30%, etc.). The exemplary fractions and ranges listed here are for illustrative purposes and not meant to be limiting in any way. In some embodiments, the term “low oxygen” is meant to refer to 9% O₂ saturation or less, e.g., 9%, 8%, 7%, 6%, 5%, 4%, 3%, 2%, 1%, 0%, O₂ saturation, including any and all incremental fraction(s) thereof (e.g., 6.5%, 5.0%, 2.2%, 1.7%, 1.4%, 0.9%, 0.8%, 0.75%, 0.68%, 0.5%. 0.44%, 0.3%, 0.25%, 0.2%, 0.1%, 0.08%, 0.075%, 0.058%, 0.04%. 0.032%, 0.025%, 0.01%, etc.) and any range of O₂ saturation levels between 0-9%, inclusive (e.g., 0-5%, 0.05-0.1%, 0.1-0.2%, 0.1-0.5%, 0.5-2.0%, 0-8%, 5-7%, 0.3-4.2% O₂, etc.). The exemplary fractions and ranges listed here are for illustrative purposes and not meant to be limiting in any way.

TABLE 2
Oxygen levels

| Compartment | Oxygen Tension |
|---|---|
| stomach | ~60 torr (e.g., 58 +/− 15 torr) |
| duodenum and first part of | ~30 torr (e.g., 32 +/− 8 torr); ~ 20% oxygen |
| jejunum | in ambient air |
| Ileum (mid- small intestine) | ~10 torr; ~6% oxygen in ambient air (e.g., |
| | 11 +/− 3 torr) |
| Distal sigmoid colon | ~ 3 torr (e.g., 3 +/− 1 torr) |
| colon | <2torr |
| Lumen of cecum | <1 torr |
| tumor | <32 torr (most tumors are <15 torr) |

[0069] “Microorganism” refers to an organism or microbe of microscopic, submicroscopic, or ultramicroscopic size that typically consists of a single cell. Examples of microorganisms include bacteria, viruses, parasites, fungi, certain algae, yeast, e.g., Saccharomyces, and protozoa. In some aspects, the microorganism is engineered (“engineered microorganism”) to produce one or more therapeutic molecules, e.g., an anti-inflammatory or barrier enhancer molecule. In certain embodiments, the engineered microorganism is an engineered bacterium.

[0070] “Non-pathogenic bacteria” refer to bacteria that are not capable of causing disease or harmful responses in a host. In some embodiments, non-pathogenic bacteria are Gram-negative bacteria. In some embodiments, non-pathogenic bacteria are Gram-positive bacteria. In some embodiments, non-pathogenic bacteria do not contain lipopolysaccharides (LPS). In some embodiments, non-pathogenic bacteria are commensal bacteria. Examples of non-pathogenic bacteria include, but are not limited to certain strains belonging to the genus Bacillus, Bacteroides, Bifidobacterium, Brevibacteria, Clostridium, Enterococcus, Escherichia coli, Lactobacillus, Lactococcus, Saccharomyces, and Staphylococcus, e.g., Bacillus coagulans, Bacillus subtilis, Bacteroides fragilis, Bacteroides subtilis, Bacteroides thetaiotaomicron, Bifidobacterium bifidum, Bifidobacterium infantis, Bifidobacterium lactis, Bifidobacterium longum, Clostridium butyricum, Enterococcus faecium, Escherichia coli, Escherichia coli Nissle, Lactobacillus acidophilus, Lactobacillus bulgaricus, Lactobacillus casei, Lactobacillus johnsonii, Lactobacillus paracasei, Lactobacillus plantarum, Lactobacillus reuteri, Lactobacillus rhamnosus, Lactococcus lactis and Saccharomyces boulardii (Sonnenborn et al., 2009; Dinleyici et al., 2014; U.S. Pat. Nos. 6,835,376; 6,203,797; 5,589,168; 7,731,976). Non-pathogenic bacteria also include commensal bacteria, which are present in the indigenous microbiota of the gut. In one embodiment, the disclosure further includes non-pathogenic Saccharomyces, such as Saccharomyces boulardii. Naturally pathogenic bacteria may be genetically engineered to reduce or eliminate pathogenicity.

[0071] “Probiotic” is used to refer to live, non-pathogenic microorganisms, e.g., bacteria, which can confer health benefits to a host organism that contains an appropriate amount of the microorganism. In some embodiments, the host organism is a mammal. In some embodiments, the host organism is a human. In some embodiments, the probiotic bacteria are Gram-negative bacteria. In some embodiments, the probiotic bacteria are Gram-positive bacteria. Some species, strains, and/or subtypes of non-pathogenic bacteria are currently recognized as probiotic bacteria. Examples of probiotic bacteria include, but are not limited to, certain strains belonging to the genus Bifidobacteria, Escherichia Coli, Lactobacillus, and Saccharomyces e.g., Bifidobacterium bifidum, Enterococcus faecium, Escherichia coli strain Nissle, Lactobacillus acidophilus, Lactobacillus bulgaricus, Lactobacillus paracasei, and Lactobacillus plantarum, and Saccharomyces boulardii (Dinleyici et al., 2014; U.S. Pat. Nos. 5,589,168; 6,203,797; 6,835,376). The probiotic may be a variant or a mutant strain of bacterium (Arthur et al., 2012; Cuevas-Ramos et al., 2010; Olier et al., 2012; Nougayrede et al., 2006). Non-pathogenic bacteria may be genetically engineered to enhance or improve desired biological properties, e.g., survivability. Non-pathogenic bacteria may be genetically engineered to provide probiotic properties. Probiotic bacteria may be genetically engineered to enhance or improve probiotic properties.

[0072] As used herein, the term “auxotroph” or “auxotrophic” refers to an organism that requires a specific factor, e.g., an amino acid, a sugar, or other nutrient) to support its growth. An “auxotrophic modification” is a genetic modification that causes the organism to die in the absence of an exogenously added nutrient essential for survival or growth because it is unable to produce said nutrient. As used herein, the term “essential gene” refers to a gene which is necessary to for cell growth and/or survival. Essential genes are described in more detail infra and include, but are not limited to, DNA synthesis genes (such as thyA), cell wall synthesis genes (such as dapA), and amino acid genes (such as serA and metA).

[0073] As used herein, the term “modulate” and its cognates means to alter, regulate, or adjust positively or negatively a molecular or physiological readout, outcome, or process, to effect a change in said readout, outcome, or process as compared to a normal, average, wild-type, or baseline measurement. Thus, for example, “modulate” or “modulation” includes up-regulation and down-regulation. A non-limiting example of modulating a readout, outcome, or process is effecting a change or alteration in the normal or baseline functioning, activity, expression, or secretion of a biomolecule (e.g., a protein, enzyme, cytokine, growth factor, hormone, metabolite, short chain fatty acid, or other compound). Another non-limiting example of modulating a readout, outcome, or process is effecting a change in the amount or level of a biomolecule of interest, e.g., in the serum and/or the gut lumen. In another non-limiting example, modulating a readout, outcome, or process relates to a phenotypic change or alteration in one or more disease symptoms. Thus, “modulate” is used to refer to an increase, decrease, masking, altering, overriding or restoring the normal functioning, activity, or levels of a readout, outcome or process (e.g, biomolecule of interest, and/or molecular or physiological process, and/or a phenotypic change in one or more disease symptoms).

[0074] As used herein, the terms “modulate” and “treat” a disease and their cognates refer to an amelioration of a disease, disorder, and/or condition, or at least one discernible symptom thereof. In another embodiment, “modulate” and “treat” refer to an amelioration of at least one measurable physical parameter, not necessarily discernible by the patient. In another embodiment, “modulate” and “treat” refer to inhibiting the progression of a disease, disorder, and/or condition, either physically (e.g., stabilization of a discernible symptom), physiologically (e.g., stabilization of a physical parameter), or both. In another embodiment, “modulate” and “treat” refer to slowing the progression or reversing the progression of a disease, disorder, and/or condition. As used herein, “prevent” and its cognates refer to delaying the onset or reducing the risk of acquiring a given disease, disorder and/or condition or a symptom associated with such disease, disorder, and/or condition.

[0075] Those in need of treatment may include individuals already having a particular medical disorder, as well as those at risk of having, or who may ultimately acquire the disorder. The need for treatment is assessed, for example, by the presence of one or more risk factors associated with the development of a disorder, the presence or progression of a disorder, or likely receptiveness to treatment of a subject having the disorder. Treating autoimmune disorders and/or diseases and conditions associated with gut inflammation and/or compromised gut barrier function may encompass reducing or eliminating excess inflammation and/or associated symptoms, and does not necessarily encompass the elimination of the underlying disease. Treating the diseases described herein may encompass increasing levels EGF and does not necessarily encompass the elimination of the underlying disease.

[0076] Those in need of treatment may include individuals already having a particular cancer, as well as those at risk of having, or who may ultimately acquire the cancer. The need for treatment is assessed, for example, by the presence of one or more risk factors associated with the development of a cancer (e.g., alcohol use, tobacco use, obesity, excessive exposure to ultraviolet radiation, high levels of estrogen, family history, genetic susceptibility), the presence or progression of a cancer, or likely receptiveness to treatment of a subject having the cancer. Cancer is caused by genomic instability and high mutation rates within affected cells. Treating cancer may encompass eliminating symptoms associated with the cancer and/or modulating the growth and/or volume of a subject's tumor and does not necessarily encompass the elimination of the underlying cause of the cancer, e.g., an underlying genetic predisposition.

[0077] “Cancer” or “cancerous” is used to refer to a physiological condition that is characterized by unregulated cell growth. In some embodiments, cancer refers to a tumor. “Tumor” is used to refer to any neoplastic cell growth or proliferation or any pre-cancerous or cancerous cell or tissue. A tumor may be malignant or benign. Side effects of cancer treatment may include, but are not limited to, opportunistic autoimmune disorder(s), systemic toxicity, anemia, loss of appetite, irritation of bladder lining, bleeding and bruising (thrombocytopenia), changes in taste or smell, constipation, diarrhea, dry mouth, dysphagia, edema, fatigue, hair loss (alopecia), infection, infertility, lymphedema, mouth sores, nausea, pain, peripheral neuropathy, tooth decay, urinary tract infections, and/or problems with memory and concentration (National Cancer Institute). Those in need of treatment may include individuals already having a particular cancer, as well as those at risk of having, or who may ultimately acquire an autoimmune disorder.

[0078] As used herein, “diseases and conditions associated with gut inflammation and/or compromised gut barrier function” include, but are not limited to, inflammatory bowel diseases, diarrheal diseases, and related diseases. “Inflammatory bowel diseases” and “IBD” are used interchangeably herein to refer to a group of diseases associated with gut inflammation, which include, but are not limited to, Crohn's disease, ulcerative colitis, collagenous colitis, lymphocytic colitis, diversion colitis, Bechet's disease, and indeterminate colitis. As used herein, “diarrheal diseases” include, but are not limited to, acute watery diarrhea, e.g., cholera; acute bloody diarrhea, e.g., dysentery; and persistent diarrhea. As used herein, related diseases include, but are not limited to, short bowel syndrome, ulcerative proctitis, proctosigmoiditis, left-sided colitis, pancolitis, and fulminant colitis.

[0079] Symptoms associated with the aforementioned diseases and conditions include, but are not limited to, one or more of diarrhea, bloody stool, mouth sores, perianal disease, abdominal pain, abdominal cramping, fever, fatigue, weight loss, iron deficiency, anemia, appetite loss, weight loss, anorexia, delayed growth, delayed pubertal development, inflammation of the skin, inflammation of the eyes, inflammation of the joints, inflammation of the liver, and inflammation of the bile ducts.

[0080] As used herein, “metabolic diseases” include, but are not limited to, type 1 diabetes; type 2 diabetes; metabolic syndrome; Bardet-Biedel syndrome; Prader-Willi syndrome; non-alcoholic fatty liver disease; tuberous sclerosis; Albright hereditary osteodystrophy; brain-derived neurotrophic factor (BDNF) deficiency; Single-minded 1 (SIM1) deficiency; leptin deficiency; leptin receptor deficiency; pro-opiomelanocortin (POMC) defects; proprotein convertase subtilisin/kexin type 1 (PCSK1) deficiency; Src homology 2B1 (SH2B1) deficiency; pro-hormone convertase 1/3 deficiency; melanocortin-4-receptor (MC4R) deficiency; Wilms tumor, aniridia, genitourinary anomalies, and mental retardation (WAGR) syndrome; pseudohypoparathyroidism type 1A; Fragile X syndrome; Borjeson-Forsmann-Lehmann syndrome; Alstrom syndrome; Cohen syndrome; and ulnar-mammary syndrome.

[0081] Symptoms associated with the aforementioned diseases and conditions include, but are not limited to, one or more of weight gain, obesity, fatigue, hyperlipidemia, hyperphagia, hyperdipsia, polyphagia, polydipsia, polyuria, pain of the extremities, numbness of the extremities, blurry vision, nystagmus, hearing loss, cardiomyopathy, insulin resistance, light sensitivity, pulmonary disease, liver disease, liver cirrhosis, liver failure, kidney disease, kidney failure, seizures, hypogonadism, and infertility.

[0082] As used herein a “pharmaceutical composition” refers to a preparation of genetically engineered microorganism of the disclosure, e.g., recombinant bacteria, with other components such as a physiologically suitable carrier and/or excipient.

[0083] The phrases “physiologically acceptable carrier” and “pharmaceutically acceptable carrier” which may be used interchangeably refer to a carrier or a diluent that does not cause significant irritation to an organism and does not abrogate the biological activity and properties of the administered bacterial or viral compound. An adjuvant is included under these phrases.

[0084] The term “excipient” refers to an inert substance added to a pharmaceutical composition to further facilitate administration of an active ingredient. Examples include, but are not limited to, calcium bicarbonate, sodium bicarbonate calcium phosphate, various sugars and types of starch, cellulose derivatives, gelatin, vegetable oils, polyethylene glycols, and surfactants, including, for example, polysorbate 20.

[0085] The terms “therapeutically effective dose” and “therapeutically effective amount” are used to refer to an amount of a compound that results in prevention, delay of onset of symptoms, or amelioration of symptoms of a condition, e.g., inflammation, diarrhea, an autoimmune disorder. A therapeutically effective amount may, for example, be sufficient to treat, prevent, reduce the severity, delay the onset, and/or reduce the risk of occurrence of one or more symptoms of an autoimmune a disorder and/or a disease or condition as described herein. A therapeutically effective amount, as well as a therapeutically effective frequency of administration, can be determined by methods known in the art and discussed below.

[0086] As used herein, the term “bacteriostatic” or “cytostatic” refers to a molecule or protein which is capable of arresting, retarding, or inhibiting the growth, division, multiplication or replication of recombinant bacterial cell of the disclosure.

[0087] As used herein, the term “bactericidal” refers to a molecule or protein which is capable of killing the recombinant bacterial cell of the disclosure.

[0088] As used herein, the term “toxin” refers to a protein, enzyme, or polypeptide fragment thereof, or other molecule which is capable of arresting, retarding, or inhibiting the growth, division, multiplication or replication of the recombinant bacterial cell of the disclosure, or which is capable of killing the recombinant bacterial cell of the disclosure. The term “toxin” is intended to include bacteriostatic proteins and bactericidal proteins. The term “toxin” is intended to include, but not limited to, lytic proteins, bacteriocins (e.g., microcins and colicins), gyrase inhibitors, polymerase inhibitors, transcription inhibitors, translation inhibitors, DNases, and RNases. The term “anti-toxin” or “antitoxin,” as used herein, refers to a protein or enzyme which is capable of inhibiting the activity of a toxin. The term anti-toxin is intended to include, but not limited to, immunity modulators, and inhibitors of toxin expression. Examples of toxins and antitoxins are known in the art and described in more detail infra.

[0089] As used herein, “payload” refers to one or more molecules of interest to be produced by a genetically engineered microorganism, such as a bacteria or a virus. In some embodiments, the payload is a therapeutic EGF payload. In some embodiments, the payload is a regulatory molecule, e.g., a transcriptional regulator such as FNR. In some embodiments, the payload comprises a regulatory element, such as a promoter or a repressor. In some embodiments, the payload comprises an inducible promoter, such as from FNRS or a cI857 repressor-pR promoter.

[0090] In some embodiments, the payload comprises a repressor element, such as a kill switch. In some embodiments, the payload comprises an antibiotic resistance gene or genes. In some embodiments, the payload is encoded by a gene, multiple genes, gene cassette, or an operon. In alternate embodiments, the payload is produced by a biosynthetic or biochemical pathway, wherein the biosynthetic or biochemical pathway may optionally be endogenous to the microorganism. In alternate embodiments, the payload is produced by a biosynthetic or biochemical pathway, wherein the biosynthetic or biochemical pathway is not endogenous to the microorganism. In some embodiments, the genetically engineered microorganism comprises two or more payloads.

[0091] As used herein, the term “conventional treatment” or “conventional therapy” refers to treatment or therapy that is currently accepted, considered current standard of care, and/or used by most healthcare professionals for treating a disease or disorder, e.g., cancer, autoimmune disorders, metabolic diseases, diseases relating to inborn errors of metabolism, neurological or neurodegenerative diseases, or diseases associated with inflammation and/or reduced gut barrier function. It is different from alternative or complementary therapies, which are not as widely used.

[0092] As used herein, the term “polypeptide” includes “polypeptide” as well as “polypeptides,” and refers to a molecule composed of amino acid monomers linearly linked by amide bonds (i.e., peptide bonds). The term “polypeptide” refers to any chain or chains of two or more amino acids, and does not refer to a specific length of the product. Thus, “peptides,” “dipeptides,” “tripeptides, “oligopeptides,” “protein,” “amino acid chain,” or any other term used to refer to a chain or chains of two or more amino acids, are included within the definition of “polypeptide,” and the term “polypeptide” may be used instead of, or interchangeably with any of these terms. The term “polypeptide” is also intended to refer to the products of post-expression modifications of the polypeptide, including but not limited to glycosylation, acetylation, phosphorylation, amidation, derivatization, proteolytic cleavage, or modification by non-naturally occurring amino acids. A polypeptide may be derived from a natural biological source or produced by recombinant technology. In other embodiments, the polypeptide is produced by the recombinant bacteria of the current disclosure. A polypeptide may be of a size of about 3 or more, 5 or more, 10 or more, 20 or more, 25 or more, 50 or more, 75 or more, 100 or more, 200 or more, 500 or more, 1,000 or more, or 2,000 or more amino acids. Polypeptides may have a defined three-dimensional structure, although they do not necessarily have such structure. Polypeptides with a defined three-dimensional structure are referred to as folded, and polypeptides, which do not possess a defined three-dimensional structure, but rather can adopt a large number of different conformations, are referred to as unfolded. The term “peptide” or “polypeptide” may refer to an amino acid sequence that corresponds to a protein or a portion of a protein or may refer to an amino acid sequence that corresponds with non-protein sequence, e.g., a sequence selected from a regulatory peptide sequence, leader peptide sequence, signal peptide sequence, linker peptide sequence, and other peptide sequence.

[0093] An “isolated” polypeptide or a fragment, variant, or derivative thereof refers to a polypeptide that is not in its natural milieu. No particular level of purification is required. Recombinantly produced polypeptides and proteins expressed in host cells, including but not limited to bacterial or mammalian cells, are considered isolated for purposed of the invention, as are native or recombinant polypeptides which have been separated, fractionated, or partially or substantially purified by any suitable technique. Recombinant peptides, polypeptides or proteins refer to peptides, polypeptides or proteins produced by recombinant DNA techniques, i.e., produced from cells, microbial or mammalian, transformed by an exogenous recombinant DNA expression construct encoding the polypeptide. Proteins or peptides expressed in most bacterial cultures will typically be free of glycan. Fragments, derivatives, analogs or variants of the foregoing polypeptides, and any combination thereof are also included as polypeptides. The terms “fragment,” “variant,” “derivative” and “analog” include polypeptides having an amino acid sequence sufficiently similar to the amino acid sequence of the original peptide and include any polypeptides, which retain at least one or more properties of the corresponding original polypeptide. Fragments of polypeptides include proteolytic fragments, as well as deletion fragments. Fragments also include specific antibody or bioactive fragments or immunologically active fragments derived from any polypeptides described herein. Variants may occur naturally or be non-naturally occurring. Non-naturally occurring variants may be produced using mutagenesis methods known in the art. Variant polypeptides may comprise conservative or non-conservative amino acid substitutions, deletions or additions.

[0094] Polypeptides also include fusion proteins. As used herein, the term “variant” includes a fusion protein, which comprises a sequence of the original peptide or sufficiently similar to the original peptide. As used herein, the term “fusion protein” refers to a chimeric protein comprising amino acid sequences of two or more different proteins. Typically, fusion proteins result from well known in vitro recombination techniques. Fusion proteins may have a similar structural function (but not necessarily to the same extent), and/or similar regulatory function (but not necessarily to the same extent), and/or similar biochemical function (but not necessarily to the same extent) and/or immunological activity (but not necessarily to the same extent) as the individual original proteins which are the components of the fusion proteins. “Derivatives” include but are not limited to peptides, which contain one or more naturally occurring amino acid derivatives of the twenty standard amino acids. “Similarity” between two peptides is determined by comparing the amino acid sequence of one peptide to the sequence of a second peptide. An amino acid of one peptide is similar to the corresponding amino acid of a second peptide if it is identical or a conservative amino acid substitution. Conservative substitutions include those described in Dayhoff, M. O., ed., The Atlas of Protein Sequence and Structure 5, National Biomedical Research Foundation, Washington, D.C. (1978), and in Argos, EMBO J. 8 (1989), 779-785. For example, amino acids belonging to one of the following groups represent conservative changes or substitutions: -Ala, Pro, Gly, Gln, Asn, Ser, Thr; -Cys, Ser, Tyr, Thr; -Val, Ile, Leu, Met, Ala, Phe; -Lys, Arg, His; -Phe, Tyr, Trp, His; and -Asp, Glu.

[0095] In some embodiments of the disclosure, the recombinant bacteria comprise one or more gene sequence(s) encoding one or more fusion proteins. In some embodiments, the recombinant bacteria express a fusion protein, in which a secretion tag polypeptide is fused to an EGF polypeptide, i.e., the secretion tag is linked to the polypeptide through a peptide bond or a linker. In some embodiments, the recombinant bacteria express an EGF polypeptide which is fused to a stabilizing polypeptide. As used herein “stabilizing polypeptide” extends the half-life of the EGF polypeptide to which it is fused. Non-limiting examples of fusion proteins containing such stabilizing polypeptides include Fc fusion proteins, transferrin fusion proteins, and albumin fusion proteins (Strohl, BioDrugs. 2015; 29(4): 215-239). In some embodiments, the EGF polypeptide is fused to an inert polypeptide to extend the half-life. A non-limiting example of such a polypeptide is XTEN (Schellenberger V, et al. Nat Biotechnol. 2009; 27:1186-1190). Another non-limiting example of a half-life extending polypeptide is CTP. CTP naturally extends protein's half-life in human serum, likely because the negatively charged, heavily sialylated CTP impairs renal clearance. Another non-limiting example of a polypeptide which can be fused to EGF to extend half-life is ELPs, which are repeating peptide units containing sequences commonly found in elastin (repeats of V-P-G-x-G, where x is any amino acid except proline (SEQ ID NO: 1057) (Strohl et al.). Other non-limiting examples of a polypeptide containing a polypeptide repeat sequence which can be fused to EGF are PAS (polymer using three repeating amino acids, proline, alanine and serine) and HAP (glycine-rich HAP).

[0096] As used herein, the term “sufficiently similar” means a first amino acid sequence that contains a sufficient or minimum number of identical or equivalent amino acid residues relative to a second amino acid sequence such that the first and second amino acid sequences have a common structural domain and/or common functional activity. For example, amino acid sequences that comprise a common structural domain that is at least about 45%, 50%, 55%, 60%, 65%, 70%, 75%, 80%, 85%, 90%, 91%, 92%, 93%, 94%, 95%, 96%, 97%, 98%, 99%, or 100%, identical are defined herein as sufficiently similar. Preferably, variants will be sufficiently similar to the amino acid sequence of the peptides of the disclosure. Such variants generally retain the functional activity of the peptides of the present disclosure. Variants include peptides that differ in amino acid sequence from the native and wt peptide, respectively, by way of one or more amino acid deletion(s), addition(s), and/or substitution(s). These may be naturally occurring variants as well as artificially designed ones.

[0097] As used herein the term “linker”, “linker peptide” or “peptide linkers” or “linker” refers to synthetic or non-native or non-naturally-occurring amino acid sequences that connect or link two polypeptide sequences, e.g., that link two polypeptide domains. As used herein the term “synthetic” refers to amino acid sequences that are not naturally occurring. Exemplary linkers are described herein. Additional exemplary linkers are provided in US 20140079701 and in Chen et al., Adv Drug Deliv Rev. 2013; 65(10): 1357-1369, the contents of which are herein incorporated by reference in its entirety. Table 3 depicts non-limiting examples of linkers known in the art.

TABLE 3
Linkers

| | | | SEQ |
|---|---|---|---|
| | | | ID |
| | | | NO: |
| Increase Stability/Folding | | | |
| scFv+DB2:D24 | 1063 | (GGGGS)3 | 1063 |
| G-CSF-Tf | 1063 | (GGGGS)3 | 1063 |
| HBsAg preS1 | 1063 | (GGGGS)3 | 1063 |
| Myc- Est2p | 1061 | (Gly)8 | 1061 |
| albumin-ANF | 1064 | (Gly)6 | 1064 |
| virus coat | 1065 | (EAAAK)3 | 1065 |
| protein | | | |
| beta-glucanase- | 1066 | (EAAAK)n (n = 1-3) | 1066 |
| xylanase | | | |
| Increase expression | | | |
| hGH-Tf and | 1067 | A(EAAAK)4ALEA(EAAAK)4A | 1067 |
| Tf-hGH | | | |
| G-CSF-Tf and | 1067 | A(EAAAK)4ALEA(EAAAK)4A | 1067 |
| Tf-G-CSF | rigid | | |
| Improve biological activty | | | |
| G-CSF-Tf | 1063 | (GGGGS)3 | 1063 |
| G-CSF-Tf | 1067 | A(EAAAK)4ALEA(EAAAK)4A | 1067 |
| hGH-Tf | 1067 | A(EAAAK)4ALEA(EAAAK)4A | 1067 |
| HSA-IFN-a2b | 1058 | GGGGS | 1058 |
| HSA-IFN-a2b | 1068 | PAPAP | 1068 |
| HSA-IFN-a2b | 1069 | AEAAAKEAAAKA | 1069 |
| PGA-rTHS | 1070 | (GGGGS)n (n = 1, 2, 4) | 1070 |
| interferon-y- | 1071 | (Ala-Pro)n (10 − 34 aa) | 1071 |
| gp120 | | | |
| GSF-S-S-Tf | | disulfide | |
| IFN-a2b-HSA | | disulfide | |
| Enable targeting | | | |
| FIX-albumin | 1072 | VSQTSKLTR↓AETVFPDV | 1072 |
| LAP-IFN-ß | 1073 | PLG ↓ LWA | 1073 |
| MazE-MazF | 1074; 1075 | RVL↓AEA; EDVVCC↓SMSY; | 1074; |
| | | | 1075 |
| | | GGIEGR↓GSC | 1076 |
| Immunotoxins | cleavable | TRHRQPR↓GWE; | 1077 |
| | cleavable | AGNRVRR↓SVG; | 1078 |
| | cleavable | RRRRRRR↓R↓R | 1079 |
| Immunotoxin | cleavable | GFLG↓ | 1080 |
| Alter PK | | | |
| G-CSF-Tf and | dipeptide | LE | |
| hGH-Tf | rigid | A(EAAAK)4ALEA(EAAAK)4A | 1067 |
| | cleavable | Disulfide | |

[0098] As used herein the term “codon-optimized” refers to the modification of codons in the gene or coding regions of a nucleic acid molecule to reflect the typical codon usage of the host organism without altering the polypeptide encoded by the nucleic acid molecule. Such optimization includes replacing at least one, or more than one, or a significant number, of codons with one or more codons that are more frequently used in the genes of the host organism. A “codon-optimized sequence” refers to a sequence, which was modified from an existing coding sequence, or designed, for example, to improve translation in an expression host cell or organism of a transcript RNA molecule transcribed from the coding sequence, or to improve transcription of a coding sequence. Codon optimization includes, but is not limited to, processes including selecting codons for the coding sequence to suit the codon preference of the expression host organism. Many organisms display a bias or preference for use of particular codons to code for insertion of a particular amino acid in a growing polypeptide chain. Codon preference or codon bias, differences in codon usage between organisms, is allowed by the degeneracy of the genetic code, and is well documented among many organisms. Codon bias often correlates with the efficiency of translation of messenger RNA (mRNA), which is in turn believed to be dependent on, inter alia, the properties of the codons being translated and the availability of particular transfer RNA (tRNA) molecules. The predominance of selected tRNAs in a cell is generally a reflection of the codons used most frequently in peptide synthesis. Accordingly, genes can be tailored for optimal gene expression in a given organism based on codon optimization.

[0099] As used herein, the terms “secretion system” or “secretion protein” refers to a native or non-native secretion mechanism capable of secreting or exporting a biomolecule, e.g., polypeptide from the microbial, e.g., bacterial cytoplasm. The secretion system may comprise a single protein or may comprise two or more proteins assembled in a complex e.g., HlyBD. Non-limiting examples of secretion systems for gram negative bacteria include the type I (e.g., hemolysin secretion system), type II, type III, type III flagellar, type IV, type V, type VI, type VII, type VIII secretion systems and modifications thereof, e.g., modified type III, modified type III flagellar, resistance-nodulation-division (RND) multi-drug efflux pumps, and various single membrane secretion systems. Non-liming examples of secretion systems for gram positive bacteria include Sec and TAT secretion systems. In some embodiments, the polypeptide to be secreted include a “secretion tag” of either RNA or peptide origin to direct the polypeptide to specific secretion systems. In some embodiments, the secretion system is able to remove this tag before secreting the polypeptide from the engineered bacteria. For example, in Type V auto-secretion-mediated secretion the N-terminal peptide secretion tag is removed upon translocation of the “passenger” peptide from the cytoplasm into the periplasmic compartment by the native Sec system. Further, once the auto-secretor is translocated across the outer membrane the C-terminal secretion tag can be removed by either an autocatalytic or protease-catalyzed e.g., OmpT cleavage thereby releasing the anti-inflammatory or barrier enhancer molecule(s) into the extracellular milieu. In some embodiments, the secretion system involves the generation of a “leaky” or de-stabilized outer membrane, which may be accomplished by deleting or mutagenizing genes responsible for tethering the outer membrane to the rigid peptidoglycan skeleton, including for example, lpp, ompC, ompA, ompF, tolA, tolB, pal, degS, degP, and nlpl. Lpp functions as the primary ‘staple’ of the bacterial cell wall to the peptidoglycan. TolA-pal and OmpA complexes function similarly to Lpp and are other deletion targets to generate a leaky phenotype. Additionally, leaky phenotypes have been observed when periplasmic proteases, such as degS, degP or nlpI, are deactivated. Thus, in some embodiments, the engineered bacteria have one or more deleted or mutated membrane genes, e.g., selected from lpp, ompA, ompA, ompF, tolA, tolB, and pal genes. In some embodiments, the engineered bacteria have one or more deleted or mutated periplasmic protease genes, e.g., selected from degS, degP, and nlpl. In some embodiments, the engineered bacteria have one or more deleted or mutated gene(s), selected from lpp, ompA, ompA, ompF, tolA, tolB, pal, degS, degP, and nlpl genes.

[0100] The terms “phage” and “bacteriophage” are used interchangeably herein. Both terms refer to a virus that infects and replicates within a bacterium. As used herein “phage” or bacteriophage” collectively refers to prophage, lysogenic, dormant, temperate, intact, defective, cryptic, and satellite phage, phage tail bacteriocins, tailiocins, and gene transfer agents. As used therein the term “prophage” refers to the genomic material of a bacteriophage, which is integrated into a replicon of the host cell and replicates along with the host. The prophage may be able to produce phages if specifically activated. In some cases, the prophage is not able to produce phages or has never done so (i.e., defective or cryptic prophages). In some cases, prophage also refers to satellite phages. The terms “prophage” and “endogenous phage” are used interchangeably herein. “Endogenous phage” or “endogenous prophage” also refers to a phage that is present in the natural state of a bacterium (and its parental strain). As used herein the term “phage knockout” or “inactivated phage” refers to a phage which has been modified so that it can either no longer produce and/or package phage particles or it produces fewer phage particles than the wild type phage sequence. In some embodiments, the inactivated phage or phage knockout refers to the inactivation of a temperate phage in its lysogenic state, i.e., to a prophage. Such a modification refers to a mutation in the phage; such mutations include insertions, deletions (partial or complete deletion of phage genome), substitutions, inversions, at one or more positions within the phage genome, e.g., within one or more genes within the phage genome. As used herein the adjectives “phage-free”, “phage free” and “phageless” are used interchangeably to characterize a bacterium or strain which contains one or more prophages, one or more of which have been modified. The modification can result in a loss of the ability of the prophage to be induced or release phage particles. Alternatively, the modification can result in less efficient or less frequent induction or less efficient or less frequent phage release as compared to the isogenic strain without the modification. Ability to induce and release phage can be measured using a plaque assay as described herein. As used herein phage induction refers to the part of the life cycle of a lysogenic prophage, in which the lytic phage genes are activated, phage particles are produced and lysis occurs.

[0101] The articles “a” and “an,” as used herein, should be understood to mean “at least one,” unless clearly indicated to the contrary.

[0102] The phrase “and/or,” when used between elements in a list, is intended to mean either (1) that only a single listed element is present, or (2) that more than one element of the list is present. For example, “A, B, and/or C” indicates that the selection may be A alone; B alone; C alone; A and B; A and C; B and C; or A, B, and C. The phrase “and/or” may be used interchangeably with “at least one of” or “one or more of” the elements in a list.

[0103] Ranges provided herein are understood to be shorthand for all of the values within the range. For example, a range of 1 to 50 is understood to include any number, combination of numbers, or sub-range from the group consisting 1, 2, 3, 4, 5, 6, 7, 8, 9, 10, 11, 12, 13, 14, 15, 16, 17, 18, 19, 20, 21, 22, 23, 24, 25, 26, 27, 28, 29, 30, 31, 32, 33, 34, 35, 36, 37, 38, 39, 40, 41, 42, 43, 44, 45, 46, 47, 48, 49, or 50.

### Bacteria

[0104] The genetically engineered microorganisms, or programmed microorganisms, such as recombinant bacteria of the disclosure are capable of producing EGF. In certain embodiments, the recombinant bacteria are obligate anaerobic bacteria. In certain embodiments, the recombinant bacteria are facultative anaerobic bacteria. In certain embodiments, the recombinant bacteria are aerobic bacteria. In some embodiments, the recombinant bacteria are Gram-positive bacteria. In some embodiments, the recombinant bacteria are Gram-positive bacteria and lack LPS. In some embodiments, the recombinant bacteria are Gram-negative bacteria. In some embodiments, the recombinant bacteria are Gram-positive and obligate anaerobic bacteria. In some embodiments, the recombinant bacteria are Gram-positive and facultative anaerobic bacteria. In some embodiments, the recombinant bacteria are non-pathogenic bacteria. In some embodiments, the recombinant bacteria are commensal bacteria. In some embodiments, the recombinant bacteria are probiotic bacteria. In some embodiments, the recombinant bacteria are naturally pathogenic bacteria that are modified or mutated to reduce or eliminate pathogenicity. Exemplary bacteria include, but are not limited to, Bacillus, Bacteroides, Bifidobacterium, Brevibacteria, Caulobacter, Clostridium, Enterococcus, Escherichia coli, Lactobacillus, Lactococcus, Listeria, Mycobacterium, Saccharomyces, Salmonella, Staphylococcus, Streptococcus, Vibrio, Bacillus coagulans, Bacillus subtilis, Bacteroides fragilis, Bacteroides subtilis, Bacteroides thetaiotaomicron, Bifidobacterium adolescentis, Bifidobacterium bifidum, Bifidobacterium breve UCC2003, Bifidobacterium infantis, Bifidobacterium lactis, Bifidobacterium longum, Clostridium acetobutylicum, Clostridium butyricum, Clostridium butyricum M-55, Clostridium cochlearum, Clostridium felsineum, Clostridium histolyticum, Clostridium multifermentans, Clostridium novyi-NT, Clostridium paraputrificum, Clostridium pasteureanum, Clostridium pectinovorum, Clostridium perfringens, Clostridium roseum, Clostridium sporogenes, Clostridium tertium, Clostridium tetani, Clostridium tyrobutyricum, Corynebacterium parvum, Escherichia coli MG1655, Escherichia coli Nissle 1917, Listeria monocytogenes, Mycobacterium bovis, Salmonella choleraesuis, Salmonella typhimurium, and Vibrio cholera. In certain embodiments, the recombinant bacteria are selected from the group consisting of Enterococcus faecium, Lactobacillus acidophilus, Lactobacillus bulgaricus, Lactobacillus casei, Lactobacillus johnsonii, Lactobacillus paracasei, Lactobacillus plantarum, Lactobacillus reuteri, Lactobacillus rhamnosus, Lactococcus lactis, and Saccharomyces boulardii, Clostridium clusters IV and XIVa of Firmicutes (including species of Eubacterium), Roseburia, Faecalibacterium, Enterobacter, Faecalibacterium prausnitzii, Clostridium difficile, Subdoligranulum, Clostridium sporogenes, Campylobacter jejuni, Clostridium saccharolyticum, Klebsiella, Citrobacter, Pseudobutyrivibrio, and Ruminococcus. In certain embodiments, the recombinant bacteria are selected from Bacteroides fragilis, Bacteroides thetaiotaomicron, Bacteroides subtilis, Bifidobacterium bifidum, Bifidobacterium infantis, Bifidobacterium lactis, Clostridium butyricum, Escherichia coli, Escherichia coli Nissle, Lactobacillus acidophilus, Lactobacillus plantarum, Lactobacillus reuteri, and Lactococcus lactis

[0105] In some embodiments, the recombinant bacterium is a Gram-positive bacterium, e.g., Clostridium, that is naturally capable of producing high levels of butyrate. In some embodiments, the recombinant bacterium is selected from the group consisting of C. butyricum ZJUCB, C. butyricum 521, C. thermobutyricum ATCC 49875, C. beijerinckii, C. populeti ATCC 35295, C. tyrobutyricum JM1, C. tyrobutyricum CIP 1-776, C. tyrobutyricum ATCC 25755, C. tyrobutyricum CNRZ 596, and C. tyrobutyricum ZJU 8235. In some embodiments, the recombinant bacterium is C. butyricum CBM588, a probiotic bacterium that is highly amenable to protein secretion and has demonstrated efficacy in treating IBD (Kanai et al., 2015). In some embodiments, the recombinant bacterium is Bacillus, a probiotic bacterium that is highly genetically tractable and has been a popular chassis for industrial protein production; in some embodiments, the bacterium has highly active secretion and/or no toxic byproducts (Cutting, 2011).

[0106] In one embodiment, the bacterial cell is a Bacteroides fragilis bacterial cell. In one embodiment, the bacterial cell is a Bacteroides thetaiotaomicron bacterial cell. In one embodiment, the bacterial cell is a Bacteroides subtilis bacterial cell. In one embodiment, the bacterial cell is a Bifidobacterium bifidum bacterial cell. In one embodiment, the bacterial cell is a Bifidobacterium infantis bacterial cell. In one embodiment, the bacterial cell is a Bifidobacterium lactis bacterial cell. In one embodiment, the bacterial cell is a Clostridium butyricum bacterial cell. In one embodiment, the bacterial cell is an Escherichia coli bacterial cell. In one embodiment, the bacterial cell is a Lactobacillus acidophilus bacterial cell. In one embodiment, the bacterial cell is a Lactobacillus plantarum bacterial cell. In one embodiment, the bacterial cell is a Lactobacillus reuteri bacterial cell. In one embodiment, the bacterial cell is a Lactococcus lactis bacterial cell.

[0107] In some embodiments, the recombinant bacteria are Escherichia coli strain Nissle 1917 (E. coli Nissle), a Gram-negative bacterium of the Enterobacteriaceae family that has evolved into one of the best characterized probiotics (Ukena et al., 2007). The strain is characterized by its complete harmlessness (Schultz, 2008), and has GRAS (generally recognized as safe) status (Reister et al., 2014, emphasis added). Genomic sequencing confirmed that E. coli Nissle lacks prominent virulence factors (e.g., E. coli α-hemolysin, P-fimbrial adhesins) (Schultz, 2008). In addition, it has been shown that E. coli Nissle does not carry pathogenic adhesion factors, does not produce any enterotoxins or cytotoxins, is not invasive, and not uropathogenic (Sonnenborn et al., 2009). As early as in 1917, E. coli Nissle was packaged into medicinal capsules, called Mutaflor, for therapeutic use. E. coli Nissle has since been used to treat ulcerative colitis in humans in vivo (Rembacken et al., 1999), to treat inflammatory bowel disease, Crohn's disease, and pouchitis in humans in vivo (Schultz, 2008), and to inhibit enteroinvasive Salmonella, Legionella, Yersinia, and Shigella in vitro (Altenhoefer et al., 2004). It is commonly accepted that E. coli Nissle's therapeutic efficacy and safety have convincingly been proven (Ukena et al., 2007). In some embodiments, the recombinant bacteria are E. coli Nissle and are naturally capable of promoting tight junctions and gut barrier function. In some embodiments, the recombinant bacteria are E. coli and are highly amenable to recombinant protein technologies.

[0108] One of ordinary skill in the art would appreciate that the genetic modifications disclosed herein may be adapted for other species, strains, and subtypes of bacteria. It is known, for example, that the clostridial butyrogenic pathway genes are widespread in the genome-sequenced clostridia and related species (Aboulnaga et al., 2013). Furthermore, genes from one or more different species of bacteria can be introduced into one another, e.g., the butyrogenic genes from Peptoclostridium difficile have been expressed in Escherichia coli (Aboulnaga et al., 2013).

[0109] In one embodiment, the recombinant bacterial cell does not colonize the subject having the disorder. Unmodified E. coli Nissle and the recombinant bacteria may be destroyed, e.g., by defense factors in the gut or blood serum (Sonnenborn et al., 2009) or by activation of a kill switch, several hours or days after administration. Thus, the recombinant bacteria may require continued administration. Residence time in vivo may be calculated for the recombinant bacteria. In some embodiments, the residence time is calculated for a human subject. In some embodiments, residence time in vivo is calculated for the recombinant bacteria of the disclosure, e.g., as described herein.

[0110] In some embodiments, the bacterial cell is a recombinant bacterial cell. In some embodiments, the disclosure comprises a colony of bacterial cells disclosed herein. In another aspect, the disclosure provides a recombinant bacterial culture which comprises bacterial cells disclosed herein.

[0111] In some embodiments, the recombinant bacteria comprising a gene sequence encoding EGF further comprise a kill-switch circuit, such as any of the kill-switch circuits provided herein. For example, in some embodiments, the recombinant bacteria further comprise one or more genes encoding one or more recombinase(s) under the control of an inducible promoter, and an inverted toxin sequence. In some embodiments, the recombinant bacteria further comprise one or more genes encoding an antitoxin. In some embodiments, the engineered bacteria further comprise one or more genes encoding one or more recombinase(s) under the control of an inducible promoter and one or more inverted excision genes, wherein the excision gene(s) encode an enzyme that deletes an essential gene. In some embodiments, the recombinant bacteria further comprise one or more genes encoding an antitoxin. In some embodiments, the engineered bacteria further comprise one or more genes encoding a toxin under the control of a promoter having a TetR repressor binding site and a gene encoding the TetR under the control of an inducible promoter that is induced by arabinose, such as ParaBAD. In some embodiments, the recombinant bacteria further comprise one or more genes encoding an antitoxin.

[0112] In some embodiments, the recombinant bacteria is an auxotroph comprising a gene sequence encoding EGF and further comprises a kill-switch circuit, such as any of the kill-switch circuits described herein.

[0113] In some embodiments of the above-described recombinant bacteria, the gene sequence encoding EGF is present on a plasmid in the bacterium. In some embodiments, the gene sequence encoding EGF is present in the bacterial chromosome. In some embodiments, a gene sequence encoding a secretion protein or protein complex, such as any of the secretion systems disclosed herein, for secreting EGF, is present on a plasmid in the bacterium. In some embodiments, the gene sequence encoding a secretion protein or protein complex for secreting a biomolecule, such as any of the secretion systems disclosed herein, is present in the bacterial chromosome. In some embodiments, the gene sequence(s) encoding an antibiotic resistance gene is present on a plasmid in the bacterium. In some embodiments, the gene sequence(s) encoding an antibiotic resistance gene is present in the bacterial chromosome.

[0114] In some embodiments, the genetically engineered bacteria comprise one or more E. coli Nissle bacteriophage sequence(s), and at least one of the bacteriophage sequence(s) is mutated or modified, e.g., to delete the bacteriophage sequence, e.g., an endogenous prophage sequence, in part or whole. In some embodiments, the deletion prevents the bacteria from being able to express infectious bacteriophage particles. Non-limiting examples of such mutations or modifications are described in PCT/US2018/038840, the contents of which are incorporated by reference in their entirety. In some embodiments, the genetically engineered bacteria comprise one or modifications or mutations in one or more of Phage 1, 2 or 3 as described in PCT/US2018/038840. In some embodiments, the genetically engineered bacteria comprise a modification or mutation in Phage 3. In some embodiments, the mutations include deletions, insertions, substitutions and inversions and are located in or encompass one or more Phage 3 genes. In some embodiments, the one or more insertions comprise an antibiotic cassette. In some embodiments, the mutation is a deletion. In some embodiments, the genetically engineered bacteria comprise one or more deletions, which are located in or comprise one or more genes selected from ECOLIN_09965, ECOLIN_09970, ECOLIN_09975, ECOLIN_09980, ECOLIN_09985, ECOLIN_09990, ECOLIN_09995, ECOLIN_10000, ECOLIN_10005, ECOLIN_10010, ECOLIN_10015, ECOLIN_10020, ECOLIN_10025, ECOLIN_10030, ECOLIN_10035, ECOLIN_10040, ECOLIN_10045, ECOLIN_10050, ECOLIN_10055, ECOLIN_10065, ECOLIN_10070, ECOLIN_10075, ECOLIN_10080, ECOLIN_10085, ECOLIN_10090, ECOLIN_10095, ECOLIN_10100, ECOLIN_10105, ECOLIN_10110, ECOLIN_10115, ECOLIN_10120, ECOLIN_10125, ECOLIN_10130, ECOLIN_10135, ECOLIN_10140, ECOLIN_10145, ECOLIN_10150, ECOLIN_10160, ECOLIN_10165, ECOLIN_10170, ECOLIN_10175, ECOLIN_10180, ECOLIN_10185, ECOLIN_10190, ECOLIN_10195, ECOLIN_10200, ECOLIN_10205, ECOLIN_10210, ECOLIN_10220, ECOLIN_10225, ECOLIN_10230, ECOLIN_10235, ECOLIN_10240, ECOLIN_10245, ECOLIN_10250, ECOLIN_10255, ECOLIN_10260, ECOLIN_10265, ECOLIN_10270, ECOLIN_10275, ECOLIN_10280, ECOLIN_10290, ECOLIN_10295, ECOLIN_10300, ECOLIN_10305, ECOLIN_10310, ECOLIN_10315, ECOLIN_10320, ECOLIN_10325, ECOLIN_10330, ECOLIN_10335, ECOLIN_10340, and ECOLIN_10345. In one embodiment, the genetically engineered bacteria comprise a complete or partial deletion of one or more of ECOLIN_10110, ECOLIN_10115, ECOLIN_10120, ECOLIN_10125, ECOLIN_10130, ECOLIN_10135, ECOLIN_10140, ECOLIN_10145, ECOLIN_10150, ECOLIN_10160, ECOLIN_10165, ECOLIN_10170, and ECOLIN_10175. In one specific embodiment, the deletion is a complete deletion of ECOLIN_10110, ECOLIN_10115, ECOLIN_10120, ECOLIN_10125, ECOLIN_10130, ECOLIN_10135, ECOLIN_10140, ECOLIN_10145, ECOLIN_10150, ECOLIN_10160, ECOLIN_10165, and ECOLIN_10170, and a partial deletion of ECOLIN_10175. In one embodiment, the sequence of SEQ ID NO: 1064 of PCT/US2018/038840 is deleted from the Phage 3 genome. In one embodiment, a sequence comprising SEQ ID NO: 1064 PCT/US2018/038840 is deleted from the Phage 3 genome.

### PKS Island

[0115] In some embodiments, the engineered bacterium further comprises a modified pks island (colibactin island). Non-limiting examples are described in PCT/US2021/061579, the contents of which are herein incorporated by reference in their entirety. Colibactin is a cyclomodulin that is synthetized by enzymes encoded by the pks genomic island. See Fais 2018. The pks genomic island is “highly conserved” in Enterobacteriaceae. Id. In Escherichia coli, a 54-kilobase pks genomic island contains 19 genes, clbA to clbS, and encodes various enzymes that have been described as an “assembly line responsible for colibactin synthesis.” Id. The pks genomic island assembly line for colibactin synthesis includes three polyketide synthases (ClbC, ClbI, ClbO), three non-ribosomal peptide synthases (ClbH, ClbJ, ClbN), two hybrid non-ribosomal peptide/polyketide synthases (ClbB, ClbK), and nine accessory, tailoring, and editing proteins. The polyketide synthases, non-ribosomal peptide synthases, and hybrid enzymes “are usually organized in mega-complexes as an assembly line, in which the synthesized compound is transferred from one enzymatic module to the following one.” Id. Colibactin undergoes a prodrug activation mechanism that incorporates an N-terminal structural motif, which is removed during the final stage of biosynthesis.

[0116] In some embodiments, the bacterium comprises a partial or full deletion in one or more of clbA, clbB, clbC, clbD, clbE, clbF, clbG, clbH, clbI, clbJ, clbK, clbL, clbM, clbN, clbO, clbP, clbQ, clbR, and clbS or operably linked promoter(s) thereof, e.g., as compared to the microorganism's native clb gene(s) and operably linked promoter(s). In some embodiments, the bacteria produce less colibactin as compared a control microorganism comprising the native or unmodified pks island and/or is less genotoxic compared a control microorganism comprising the native or unmodified pks island.

[0117] In some embodiments, the bacterium comprises a modified clb sequence selected from one or more of the clbA, clbB, clbC, clbD, clbE, clbF, clbG, clbH, clbI, clbJ, clbK, clbL, clbM clbN, clbO, clbP, clbQ, clbR, and clbS gene sequences, as compared to a suitable control, e.g., the native pks island in an unmodified bacterium of the same strain and/or subtype. In some embodiments, the modified clb sequence is an insertion, a substitution, and/or a deletion as compared to the control. In some embodiments, the modified clb sequence is a deletion of the clb island, e.g., clbA, clbB, clbC, clbD, clbE, clbF, clbG, clbH, clbI, clbJ, clbK, clbL, clbM clbN, clbO, clbP, clbQ, clbR, and clbS. In one embodiment, the colibactin deletion is the whole island except for the clbS gene, e.g., a deletion of clbA, clbB, clbC, clbD, clbE, clbF, clbG, clbH, clbI, clbJ, clbK, clbL, clbM clbN, clbO, clbP, clbQ, and clbR.

[0118] In some embodiments, the modified endogenous colibactin island comprises one or more modified clb sequences selected from clbA (SEQ ID NO: 1065), clbB (SEQ ID NO: 1066), clbC (SEQ ID NO: 1067), clbD (SEQ ID NO: 1068), clbE (SEQ ID NO: 1069), clbF (SEQ ID NO: 1070), clbG (SEQ ID NO: 1071), clbH (SEQ ID NO: 1072), clbl (SEQ ID NO: 1073), clbJ (SEQ ID NO: 1074), clbK (SEQ ID NO: 1075), clbL (SEQ ID NO: 1076), clbM (SEQ ID NO: 1077), clbN (SEQ ID NO: 1078), clbO (SEQ ID NO: 1079), clbP (SEQ ID NO: 1080), clbQ (SEQ ID NO: 1081), clbR (SEQ ID NO: 1082), or clbS (SEQ ID NO: 1803) gene. In some embodiments, the modified endogenous colibactin island comprises a deletion of clbA (SEQ ID NO: 1065), clbB (SEQ ID NO: 1066), clbC (SEQ ID NO: 1067), clbD (SEQ ID NO: 1068), clbE (SEQ ID NO: 1069), clbF (SEQ ID NO: 1070), clbG (SEQ ID NO: 1071), clbH (SEQ ID NO: 1072), clbl (SEQ ID NO: 1073), clbJ (SEQ ID NO: 1074), clbK (SEQ ID NO: 1075), clbL (SEQ ID NO: 1076), clbM (SEQ ID NO: 1077), clbN (SEQ ID NO: 1078), clbO (SEQ ID NO: 1079), clbP (SEQ ID NO: 1080), clbQ (SEQ ID NO: 1081), and clbR (SEQ ID NO: 1082).

TABLE 12
Colibactin Nucleotide Sequences

| Description | |
|---|---|
| SEQ ID NO: | Nucleotide Sequence |
| clbA | ATGAGGATTGATATATTAATTGGACATACTAGTTTTTTTCATCAAACC |
| SEQ ID NO: | AGTAGAGATAACTTCCTTCACTATCTCAATGAGGAAGAAATAAAACG |
| 1065 | CTATGATCAGTTTCATTTTGTGAGTGATAAAGAACTCTATATTTTAAG |
| | CCGTATCCTGCTCAAAACAGCACTAAAAAGATATCAACCTGATGTCT |
| | CATTACAATCATGGCAATTTAGTACGTGCAAATATGGCAAACCATTT |
| | ATAGTTTTTCCTCAGTTGGCAAAAAAGATTTTTTTTAACCTTTCCCATA |
| | CTATAGATACAGTAGCCGTTGCTATTAGTTCTCACTGCGAGCTTGGTG |
| | TCGATATTGAACAAATAAGAGATTTAGACAACTCTTATCTGAATATC |
| | AGTCAGCATTTTTTTACTCCACAGGAAGCTACTAACATAGTTTCACTT |
| | CCTCGTTATGAAGGTCAATTACTTTTTTGGAAAATGTGGACGCTCAAA |
| | GAAGCTTACATCAAATATCGAGGTAAAGGCCTATCTTTAGGACTGGA |
| | TTGTATTGAATTTCATTTAACAAATAAAAAACTAACTTCAAAATATAG |
| | AGGTTCACCTGTTTATTTCTCTCAATGGAAAATATGTAACTCATTTCT |
| | CGCATTAGCCTCTCCACTCATCACCCCTAAAATAACTATTGAGCTATT |
| | TCCTATGCAGTCCCAACTTTATCACCACGACTATCAGCTAATTCATTC |
| | GTCAAATGGGCAGAATTGA* |
| clbB | ATGGATAATACCTCTGGAGATTTTCCATGTAATAAGATGGACACGCG |
| SEQ ID NO: | TAAGCAGTTACCGCTAACACCAAGTCAACAGGGGTTTTTATTCCATTC |
| 1066 | CTTAAAGGATAAGAAAAGGAGTAACTACCATGAGCATTTTACATGCA |
| | TTTTTTCTCAGCATGTAGATAGCGCCCACTTCAAGTGGGCGCTGGAAA |
| | CGTTATTTCGAAAGCATGAGTGTTTTCGCACTGATTATAACTGGGAGA |
| | TTGATGAGCGCCCTTGTCAGGTGGTGAAGACCGATGTGTTGCCGGAT |
| | ATATATGTGTTAGACTGTGAGCAAGAGGAAATACGTTTTCTACTAGCT |
| | AATGATGACATTATCATTCCTGTCCCGCAGGATGACGGTATTGATGCT |
| | ATAATTCCTCAACTGCTACAGGCTGATTTAAAATACCCATTTTCCTTG |
| | AAAACGATCCCAGTCCGGGCCTACCTTATTCAGTCAACGAAAGAAAG |
| | TGCTTTTATACTATCATACCATCATATTGTGATGGATGGCTGGAGCTT |
| | ATCCCTTTTCATTAAACAGTTGCTCCAACTCTATGGAGCGGCTGTGGT |
| | CAGTGGTGTGAGGGATGATAGCGCCATTATCCCCTCATCTCTGAAAC |
| | CCCTTGTAGACACACTGTCGGCCCGACGTCACACCTTTCAGCACGACT |
| | ATTGGGCTGCATATCTTCGGGAGGGAACACCAACTTGTATCGTGCCG |
| | CTGTCACAATATCACACAGATACTGAAGCCGAGAACAATTCTTACGT |
| | TAATCAAACAAATCATGTGGAGATCAATTTGTCTCCGGATGTGTGTCA |
| | GAAAATACAGACGCTATGCAGCGATTATCGTATCACCCCCGCAGTAA |
| | TCTTCTATGTGGCCTGGGGCATCCTGCTACAACGTTGGTGCTATGCTG |
| | ACGATGTGTTATTCGGCGCGACAATATCAGGGCGAAATATACCAATT |
| | GATGGTATAGAAGAAACACTAGGGCTATTTATTAACACGTTGCCGCT |
| | GCGTCTGCGTGATGATGGGGCGACACTGTTGCAACACTTACAACGTA |
| | TGCACCAAACACTAATAGCTCACTACAGCAATGAACATGATGCCTTA |
| | GCCAGCATACAACGGTTGGTACATAAAGAAGGTCATGCTGGGGATCT |
| | TTTTAATACCTTAGTGGTGTTGGAGAATTATCCCGTTGATATGACATT |
| | ATTGTCATGCGCGTCGCCCGTGGCAATTCGCCATCTCAGTGTACATGA |
| | ACAAACGCACTATCCGCTGACCTTGACCATCACTCAACAGAAGGGAT |
| | TCCGTTTCAGTATTGCATATGCCCTTAACTACCTGACCAACAACATGG |
| | CGCAAGCGTTGCTGATGCACCTGAGTTATCTGCTTGAACAACTGGTG |
| | GACAATCCGCAGCGCCCCATTGCTGCGTTGGTAAACTTGTCCCCATGC |
| | CAGCAGGCGCAGGTACTTCAACCCTATCTGGAACGCATGGCATGCCG |
| | GGATTGGGATAGTCAATCCAACGTCATCGAACAATTTCATCAAGTTG |
| | CTGCGACTTCGCCAGCACAGGTCGCAGTGGTTGATGAATTGTGCGCG |
| | TTGACCTATTCGGAGTTGGCAGCACAAGCTGAGCAGCTCGCGGCTTA |
| | TTTGGTACAGCAGGGTGTTATGGTTGGCGATACTGTAGGCATAATTA |
| | GCGAACGCCGGGTAAACACCGTGGTTGCCATCATCGCCATCATGTTG |
| | ATCGGGGCTGCTTATGTGCCCATCAGCCCCGACTACCCAGTGGGTAG |
| | GATGCAGGAAATTATTGATGACAGCGGCTTGGCGCTGTTGCTGGTAC |
| | ATGGCAAACCGCTAGATGCATTAAACGTTGCGCAGAGTGACCTCTGT |
| | GCATTTCCCGTCGCGCCCTCGGTGGTATTTCCGGTTATCACACCAGAT |
| | TCTCGCGCTTATGTGATTTATTCATCGGGGTCGACGGGTAAGCCAAAA |
| | GGTATCGCGGTGGCGCACCGCGGTTTATTGCGCCTGATACAAGGCGA |
| | CAGCCCGCTGAAGGTGGAGAGCGGTGAGACAACGCTGCTGACCTGCC |
| | CATTTGAGTTTGATGTTTCGGTGTTTGAGATGTGGTCTACCTTGCTCA |
| | ACCACGGCAAACTAGTATTACTCAGCAAACAGGCATTACTTGATATC |
| | AATCACATTCGCCGCACGATCGCTGATGAACAGGTGGCGCGCGCCTG |
| | GTTTACCTCATCCTTGTTTAACTCCTATGTGGCAGAAGGTGCCGATTT |
| | CTTCGGTATGTTACAACACATTACGGTGGGCGGCGAAGCAGTATCTG |
| | CGTGGCATGTCAACGACGTGATGCAAAAATACCCGCATCTGGTGGTG |
| | ACAAACGGTTATGGGCCGACGGAAAACACTATTTTTACCACCGCATA |
| | TCGTTTCAACGGGTTGCAACCCGCCCGAGTCCCGATAGGATACGCGG |
| | TACCGGGCACCTCGCTCTACATTACCGATCTCCATGGGCATTTGTTGC |
| | CTATCGGTGCCACCGGTGAACTAGTGGCGGGTGGAGTGGGGGTCGCC |
| | ATCGGCTATCAGAACAACCCGGCGCTAAGTGCGACGGTTTTTGTCCCT |
| | GATCCTTTTATTCCCGGCGGTATGATGTACAAAACTGGCGATTATGCC |
| | CGGTTGCTGGATGATGGCTGTGTTGACTGTTTTGGGCGTAAAGACGGT |
| | CAAATTAAGATCAATGGACAACGAATTGAAACCGGAGAGATCGAGC |
| | AGCGCCTGCTGGAGTGCTCCGGCATTATCGAGGCGGTAGTGGTTCCTT |
| | ACCGCGTACGTGAAACGCTGCATATTGCGGCAGTGGTCTGCGTCAAT |
| | GATAGCTATGATGAGGTGGAAGTTCGAGGGCAATTGGCTGACAGATT |
| | GCCGCCATTCGCTATTCCGGAATCCTTGGTGGTGGTGACGGAGATTGC |
| | AAAAAGCCATAGTGGCAAGGCCGACTTGGCGCAGTTGCGGTATCTCC |
| | TGCCCGCAACTCAGTGCAACGCCGTGTCCACCACGATATCAGAGGTG |
| | CATAGTGACATGGAACATGCGCTGCATGCTATCTGGCAACGCGTACT |
| | TGATAGACAAGACATTGATAGCAATGCCTCCTTTTTCGCCCTCGGTGG |
| | CACCTCATTGGATACCATCAGGGTTAAAGGGGATATTAAGCGGCAAC |
| | TTGGCTTGGAGATTGATATTACCGATCTCTTTAAGTACCCAACGCTCA |
| | CGGCGTTAGCACATTTTCTCGATACTGCCGTATCGCCGGAGGATGCA |
| | ATTCCAACGCGTGCTGTTGTCTACAGCGACATGCCGGTGGCGATTGTC |
| | GGTATGGCGGGACGTTTCCCCGGTGCGGCGAATATTGCAGCGTTGTG |
| | GACGCTGGTTGTAGGAGGGGAATCGGGATTAACACTGTTCAGTGATG |
| | AAGAGTTGCGCGCGCATGGTGTGACACCTGACACGCTTAAACAAGCG |
| | AATTATATAAAAACCAAAGGGATTGTTGATGATCACGAATGGTTTGA |
| | TGCGGATTTCTTTGGTTATACTCCCAACGAGGCGGAATGTATGGATCC |
| | GCAAATTCGCTTATTGCATCAGTGCTGCTGGCAAACTCTGGAACACG |
| | CTGGGTGCGATCCTGCCACCTTTACTGGTGCGATTGGCATTTATGCCG |
| | GACTGCTGACATCCCCCCACTGGCTTAATGCGGTAATGCAAGACACT |
| | ACCGACTCTACCGCCCTGTACAAGGCCAGTATCCTGAATATCCATTCC |
| | GTCACAGCATTGATTGCCCATGCGCTTAACCTCACCGGCCCTGCCGTG |
| | ACGCTTGACACCGCCTGCTCCACTTCGGCAGTGGCTATCCACCAGGCC |
| | TGCATCGCACTACGTAACCGGGATTGCGATGCGGCATTGGCGGGCGG |
| | CGTTTCTATCGAGATGCCTGCGTACCGGGGCTATGAATATCATGAAG |
| | GCATGATCAATGCGCGAGATGGTGTCTGTCGTCCTTTCGATAGCCAA |
| | GCCTCTGGCACAGTCACCGGTGATGGCTTAGGAATGCTGCTGCTAAA |
| | ACGTCTGGACGACGCGCTGGCGGATCGGGACTGCATCTATGGTGTGA |
| | TCAAAGGTTCGGCGGTCAATAATGATGGCAATAACAAAATCGGCTAT |
| | ACCGCGCCGAGTGTGATCGGGCAATCAACGGTAATCCGCACCAGTTT |
| | GCGCCGTGCCGGTTTTGATAGCGACAGTATCGGATTGGTGGAAGCGC |
| | ACGGCACCGGTACGGTGCTGGGTGATCCTATTGAGTTACGTGCGCTT |
| | AATGAGGTGTTTGGCCCAACACCTGTTCCGTTTTGTGTGGTTTCAGCG |
| | CTGAAAAGTAATATTGGCCACCTCAACTCCGCTGCGGGAGTGGCGGG |
| | CGTCATCAAAACAACGCTCGCCCTGCATCATCAAGTGTTGCCACCAA |
| | CAGCGCACTTTCGCCAACTCAATCCTGCTATAGATCTATCGCGTTCTG |
| | CATTGTACGTTAACCAGCAAGTCCAACCGTGGCCGTCGACGCGTCCT |
| | CGTCGTGCACTGGTGAGCTCCTTCGGCATCGGCGGCACCAATGCCAG |
| | CATCGCACTAGAAGCACATCAACATGAGGACGACCCTTCAGCGACGG |
| | GGGTACGCGACAGCTATCTGTTGTTGTTCTCCGCTAAAACACCCGCTG |
| | CGTTAGAGTTGCGCGTGGCCTCCACACTGGAATATGTCAAGCATGGA |
| | GTAGGGGTGCGCCTGCCGGATGTGGCTTATACATTGCAAACTGGACG |
| | CACAGCCTTTGACCATCGGCGGGCTTATTTGGTGAGTCGTGGGTCGA |
| | AAATCGATCTCTCCTGTGCCACGATATTGCAAGCGGAAATCTTCAATG |
| | GTCAGCGCACGACAGCGGAGATCTGCTTCATGTTTCCTGGTCAAGGT |
| | AGCCAATATCACGGCATGGCCAGCGCGCTCTATGCTCATCAACCCAT |
| | GTTTCGCCAGCACATGGATCGCTGCTTTGCTGCATTCCAACGCTATTC |
| | GACGGTCGATCTCAAGGCGTTGTTGTTTGACGATGAGGATACGCGGG |
| | ATATTGATCAAACGCAGTTCACACAACCGGCGTTGTTCTGTGTCGAAT |
| | ACAGCCTAGCGCGCACCTTGATTGATCTGGGGATTACGCCGGACAGT |
| | ATGATCGGGCACAGTCTGGGCGAGTATGTTGCGGCCTGTATTGCTGG |
| | CGTATTTACTCTTGAGGATGCGCTGCACGTCATTGAGGCGCGCGGAC |
| | GTTTGATGCAGTCCATGCGTCCCGGTAGCATGATGGCGGTCTACCTTA |
| | GTCGCGAACAGTTGACCCCATGGCTAGCTGCAGAACGGGGTATTGAA |
| | CTGGCAGCTAATAATAGCGCGCATTTTTGCGTAGTCGCGGGCGAGCA |
| | GGCGGCCATTTCCCGTTTGAGCACACGCTTAGTCGAGGGCGGGATAC |
| | AGCACAGGCGCCTGAAAACCTCTCACGCATTCCACTCGGCCATGATG |
| | ACGCCGATGCTGCACGATTTTGCACAGTTGCTGGGGCAAATCCCGAT |
| | GCACGCGCCGCACAAGCGCTTTATATCTAATGTAAGCGGTACATGGA |
| | TTACTGAGGAGCAAGCTACCTCGCCGGATTACTGGGTGCAGCAAGTG |
| | CGCAACGCGGTGCTGTTTAGCGAAGGTGCGGCGCAACTGTTGGTACA |
| | ACCCACGCTGTTTATCGAATGTGGGCCGGGTAATACGCTCTCTACCTT |
| | TATTCAAGGACATAACCAATACAGCGATCAGCCGACCCTGTTGACGC |
| | TACGCAAAGCCAACGCGGCGATCGATGATGAGCACATGTTGCATCGT |
| | ACGCTGGCGGCGCTGTGGGTCAGGGGGGAGAATATTGATTGGAGACG |
| | CTTTAACCAGACGGCACTCGGCAAGCACATTCCATTGCCGGATTACC |
| | CCTTCGAACAGACTTATTACTATCGCTATGGTGCTGCACTTTCCGGTT |
| | ATCGCCAGTATCCAAATCCTCTGCGCCGTCCGCAAGATGAGTGGCTC |
| | CAGCGTGTGCTGTGGCGGATGCACGACACATCCTTGCGGGAGGCGTT |
| | CTATGCGCCGGGCGAATTGATCATCATTATTAGTGCTGACGGCGACA |
| | AGTTACAGCAGACGCTGATGAGTAGTGGTGTCGACAGCATCACAATG |
| | CCGCTGCCGATATCGTCAGAGGACGACGTGTGGGATAATGACCGTAT |
| | TCTGACGCATTTCCACGACATCTGCGCACTTTTAGCACACAAAACCTA |
| | CCGACAGTTACATTGCTTGTATGCTCCCGGTGCGGAGGCAGGATCAT |
| | CGTTGACACAGTCGCTCTCGGGACTTTATCGTGTTGCTCGCTGGTGTA |
| | TGCACAGCACCACGCCGCTGGCGTCCTTAACAGTATTGACCCATGGT |
| | GCGTTTCGCGTACAGGAAGAGGATAATCCCGAACCGACGCTGGCAGC |
| | GTTGTCGGGCGCAGTAAACGTGTTTGCCCAAGAGCTGCACCCGACCG |
| | AAGTACGATTGATCGATATCGATGCGCAGAGCAGTGATGAGAATCTG |
| | AACTTGCTAACCCAGCGTCTGGCCCCGAAACAAGAAACGGTAATGGC |
| | GCTCAGGCAGGGGATGCTTTACCTGCGACGCTTTATCCCGACACGGC |
| | TGTTGGCGCACTTACCCCCTCAAACAGGGTGTATACCGGGCAACGTA |
| | CTGTGGATTATCGGCGGTGAAAAGGGGATTGGCCGCATGATCGGCGA |
| | AGCGCTTGCTCAGCGTGAGGGAGTCCGTGTGGTACTGAGCAGCCGCA |
| | CAGGTTATCACCATGAAGCGGTGCAGCAGGACGCATTAGACGTTATC |
| | CACTGCGACGTGACGCAGGCGGAGGCGGTTAGAGCTTGTCTGGCAAC |
| | TCTGCTCGAACGCTATGGACGGTTGGATGGCGTGATTTTTGCTGCCGA |
| | CGCTACCACCACATTGACACTGCATCAATTGAGCGAATCTGCGCTAC |
| | GCGACACGCTAACGGTGAAAGAACGGGGTACTGCTAATGTGCTGCAT |
| | GCGTTAGCGCAACGGAATCTGCTGGATGAGCGTCTGCTACTGCTGTTC |
| | TGTAACTCGTTGGCTGCCGTGAATGCGGAGATTGGCCAGACAGGCTA |
| | TGCTACCGCCAGCGCCTATTTGGATGCACTGGCACAGCAACTGCGTA |
| | CCCGCTACAAGGTGAATGCGCTCAGTATCGGGTTGGATGCATTGCGT |
| | GAGCAGGGCATGTTGTTGGATGCTATAAACGGCAGTGAATACGATGT |
| | CTTGCGTGGACTGCGCCCATTGATGACGGGAACGTTGCTACAGGCTT |
| | ATAAACAACAAGGGGCTGACACCAGCTACTACGCGCGATTATCCCCC |
| | GAGTCCGATTGGCTGCTGGATGAGCACCGGATATCCGGTATCGCCAC |
| | GCTGCCGGGAACCGGCTATCTGGCGCTGGCGTATGAAGCTCTGCGCC |
| | ATTACTTTGTGCAAGACCAAATCTGCATTGATGAATTGGTCTTTTTGG |
| | CACCGTTGACTGTGATGGACAACTGCAGTGTTGACGTTTTTGTTGACA |
| | TTTCACCTAACGGGCAAGGAGTTAGTGTCGAGGTGAAATCAATGACG |
| | GAGCGCTTTAGTGGCACGTTAACAACCCATGCCAGAGGCAGGGCGAC |
| | GCGTCTGATGGTAGACGATAATGTTGTGTGCGATCTCACGGGGCTGA |
| | TGCGCGAGATGCACACTATCACTCCTCCAACAAAGGAATTATCGAGC |
| | ACGCACTTCCACTATGGGCCGCGCTGGCACAGCGTACAACAACTGTA |
| | TGGCAATACCGCCCAGACTCAGGTTTTCGCAACGCTGGCCCTGCCCA |
| | CCGTTGCCGCTAATGATACGATCGCACTGCACCCTGCGCTGTTGGACA |
| | TCGCCAGCAGTGTTGTCGAACAACTGCCTGGTTTTCATACTGATTCGG |
| | TACCTTTCCTTTATCAGGATTTACGCCTGTACCGCCCGTTGCCGAACA |
| | CCTTACATGTGGCGCTGACTGTCAATCGGCACGATGAGGAGGGTGAC |
| | AGCTACGCTTTCACGCTCTACGACATGGCAGGCGAGATGGTTGCCCG |
| | CTGTGCGGCAATGGTGAAGCGCAAGGTACAGCTCCACATACAAGATG |
| | TCGATGACGACACGCGACTGCGCGTGCCCAGTGCCGATAACTACCAA |
| | CTGCGGCTGGCCGCTGAGGGGGAGGGGGCAGGAAAGCTAGCGTTGT |
| | GCCCTACGCCGCGCTTAGCGCTGGGGGATTCACAAGTAGAGATTGAG |
| | GTACTGGCCACCGGACTGAACTTTAAGGATGTGCTGTTCACCACGGG |
| | ATTGCTCCGGCAGCAGCCGGGTGAGGCTCCGCTGCAATTGGGACTGG |
| | AGTGCGCCGGACGCATTACTCGCGTGGGTAAAAATGTCACTGAATTT |
| | GCCCCGGGAGAGGATGTTATGGCGGTGCTAAACGGTGGTTTTGTCCA |
| | GTACGCACGGGTAGAAAGCGATTGCGTAGTGAGAAAACCAGCCCATT |
| | GTCGCATCGAACAGGCGGCTGCGCTGCCTATCGCATACCTCACCGCC |
| | TATTACGCACTGGTGGTGCGCGCTAATTTGCAACCCGGAGAACGAGT |
| | ATTGATCCACAGTGCGGGGGGGGCGTTGGCTTGGCTGCGCTACATA |
| | TTGCCAAACGCTGCGGAGCACAGATTTTCGCCACAGCAGGTAGCGAG |
| | CAGAAACGCGATTACTTGCTTTCGCTAGGCGTACATGCCGTAGCTGAT |
| | TCACACGACGAACAGTTCGCTGCCACTCTGCTGACCGCATCGGACGG |
| | ACAGGGGATGGATGTGATCCTTAACTCCCTCACAGGCCGTCTGCTTG |
| | ACGCTAGCCTCGCGCTGCTGGCACCGCTGGGCCGTTTTCTTGAGCTGG |
| | GCAGCAAGGACATTGTGGAAGACAAAGCGCTACCGATGCGTTTCTTC |
| | GCCCAAGGCGGCACCTTTATTCCGATTAATTTTCACGCGGCGCATGGT |
| | GCGTTTAGTCGCTACCTGCAACAGATTGTCGCTTGGATAGATGATAAC |
| | ACGCTACCGCTCCTTCCATGCAAATCCGTACCATTGCCCGAGGTTGCA |
| | CGCGCCTTCGCCACCCTGACCACGCCGCAGCATATTGGCAAGGTGGT |
| | GGTAACGCATCGCACTGCGGCAGGCATGGACCGGCTGAACGCCATGA |
| | TAGCAGAAAGGCGCCTCGGCGGCTATGCGCTCAGCATGAGCAATGCC |
| | GAGGTGATGCGCCAATTGTGGCCGATACTGAACACTCGCAGTCCGTG |
| | GGCGCAACTGCTGCTCTCACCTCGGGCGATCGATAGATTAGCGCGGG |
| | GCAACCGGGTGGATCGCGGTGTACCGTCTGCCGCTAACGATACGATT |
| | ACTCAGCAGACAGTGAAAAAGCGGCCCCGTCCGGAAATTGGCGTGCC |
| | TTACAGCCCCGCGACACGTGAAGTGGAACGCGTGCTCTGCCAAATCC |
| | TGGAAGAGTATCTGGGTCTGGATAGAGTAGGCATTGACGACAACTAT |
| | GCCGAATTAGGGGCAACCTCACTCGATATGGTGCAACTGAGTGGGCA |
| | AATGGCGCGTCACTATCCGCAAGTGAGCGTGGTGTCGCTGTACAACC |
| | ACGCCACCGTGCGCCAGCTGGCGACGTTTTGCCAGCCCCCGGAGGGC |
| | GAGTCAAATGCGCCATCACCACAGCCTGCAGTACAGACGAATACGCG |
| | CGCGAATCAGATAGCAAAACGTGCTTTGCAAATTGCGAAAAATACTG |
| | CGCGCAGTCACACGTCTTTGCATTAA* |
| clbC | ATGGAATACGCAAGCGAAATGAACGGCATGGAAATCGCCATTATTGG |
| SEQ ID NO: | TATGGCGGTCCGTTTCCCGCAGTCCCGGACGTTACACGAATTCTGGCA |
| 1067 | TAACATCGTTCAGGGTAAAGAGTGCGTCACCTTCTTTAGCGAGGAGG |
| | AGTTGCTGGCCGAAGGCGTCGAACAGAGTACTCTGGACAACCCGGCC |
| | TATGTACGGGCCAAGCCCTATATCGAGGGCATATGCGACTTTGATGC |
| | TGCATTTTTCGGTTACAGTCACAAAGAGGCGCAGACTCTGGATCCGA |
| | AATCCCGCGTATTACATGAAGTTGCCTACCATGCGCTGGAAGATGCA |
| | GGCTATGCCCAACGTACCAGCGATCTGATCACCGGGGTATTCGTGGG |
| | GGCGTCAGAAGATGTGGATTGGCTACGGCGTTCGCTGTCACAGATTG |
| | GCGGCGATGCGCTGAATCGTTTTGAGTCTGGCATCTATGGTCATAAG |
| | GATCTGCTCGCACATCTCATTGCCTACAGTCTCAATCTCAACGGTCCG |
| | GTGTATAGTCTCTACACCAGTTGTTCGACTTCTCTGAGTGCAACGCAT |
| | ATCGCTTGCCGCAGCTTGTTGTTTGGCGAATGTGATCTGGCGTTGGCG |
| | GGTGGAATTACTATCGATTTACCGCAGAAGTCAGGCTACTTCTGTCAA |
| | CAGGGCATGATCCACTCCACCGATGGCCACTGCCGTCCTTTTGACAGT |
| | CAGGCTTCTGGCACCCTGTTTGGCGATGGCGCGGGTGTGGTTGTGCTT |
| | CGGCGTTTGGAAGATGCTCTGGCAGCGGGCGATCGCATCTATGCGGT |
| | GATCCGGGGTAGCGCGGTCAACAATGACGGTAAACAAAAAATCGGTT |
| | TTGTCGCGCCTGGTCATGAGGGACAGAAGGCGGTCATTTGTGCGGCC |
| | TGTCATCTGGCAGAAGTAAGCCCAGAAAGCATCGGCTACGTTGAAAC |
| | CCACGGTACCGGCACCCGTATTGGCGATCCTATCGAGTTCGCTGCGTT |
| | GACGGAGGCGTTCGATACTTCACACCGCCAATACTGTGCACTAGGGG |
| | CTGTAAAGGCGAATATTGGCCACACCCACGCGGCGGCGGGCGTGGCT |
| | GGGTTAATCAAGACGGCGCTGGTACTTCATCACCGGACCATTCCGCC |
| | GCTCGCCAACTATCAAATGCCTAACTCGAAGCTGGATCTGGCGCATT |
| | CACCGTTTTATATCCCGATACAGCCGCAGGAGTGGCCCGCATCGCGG |
| | ATGCCGCCCCGCGCTGGCGTCAGTTCTTTTGGCATTGGCGGTACTAAT |
| | GTGCATATGATTTTGGAAGGGCTGAATCCTGCGGTGCGCGATGACCA |
| | TGACCAAGTGCGAGCACCGGTGTTTATCCCTCTCTCCGCGCCGTCTTT |
| | CGAGCAGTTGGATGAGCTGACGCAACAGCTTACCCCGTTGCTGGCTA |
| | CCCTTGATGCGTCAACGCTAGCCTACACACAACAAGTGGCGCGCCCC |
| | GTGTTTGATTGCCGCCGAGTGATACAAGTGGAAAACGATGGTACGCA |
| | AGCGATGCTGGCATCGCTGGATAACCTAATGCCCGACGCTCCTTGGG |
| | GCCTACACTGTCCAGATCTACGTACTACGAACGATTGTACTTACGCAC |
| | AGTGGCTGGCGCATTCGGCACATTATCAACGCGAAGCGACTGCTCTG |
| | ACGGCATTACTCGACGGCATGAATATTCCACCCGCTTATTGCCACGCT |
| | GAAACGTGGGCGGCACAAGCGAACAGCAGCCTGCTAATCAGAGGCT |
| | GCCAGACTATCGCCGCGCTAAAAACCTGGATGAACCTGCTACCGACA |
| | TTAACACTGCTGTCGGGTGCTGGAACAGGCCTTTTGCCTGCCGCTGCA |
| | GCCAGTGGCATGATTGCGACGCAAGACGTGTTGCATTTGCTGTGGGA |
| | AATGGAGCAAAAGGCGCTTCATCTCTGGCTTCCTGAGCGCCATGAAC |
| | CTATCCCCGGCTACGTGCTGGCTTGGCAAGGAAATCCCATCACCGAT |
| | GCACAGCGTAACGACAGAGGGTTTTGGAGTGAAGCGCTGTTGGCAGA |
| | TACCCGAGAACTGGGGGAGGGCGTTCACAGTATCAACTGGGTTAGGC |
| | TGCCGCCGGAAATAAGAGAAGACGTTGATGTATTGCGCTACGTGGCG |
| | CAACTGTGGTGTGCAGGTATCAATGTGGATTGGGCCGTGTGGTACGG |
| | CACTCCGCTGCCGCAACGCGGGAGCGCATCAGCATATCCCTTCGCAC |
| | ACAACCACTACCCATTGCCTGGACGGGTAATGGGTAGTGTGGAGACC |
| | CAACCCGAAGCAGGACCCGAAACGCACCACCCTTATCAGGCACGTCC |
| | CGTGTTAAGCGTACCTTTCGTAGCCGCACACTCGCGGGGTATGCAGT |
| | ATATCACAGGTCTGATGGAACTGTTGCTGGAAATATCGCCGGTCGGG |
| | GTGGACGACGACTTTTTTGAATTAGGCGGGCATTCGCTGCTGGTGAC |
| | GCAATTGACCTCCCGTTTAGAACGCGATTTCAACGTACATATCGATCT |
| | TTTGACCCTGATGGAAAACCCCAATCCGCGCAATATCTACGCGCATA |
| | TCGCGGCGCAACTGGGGGGCGAAGACAACCTCGAAATAGCCTGTCAG |
| | TAA* |
| clbD | ATGATGAACGTGGCGGTAATAGGTGCAGGAGTAATGGGAACTGGCGT |
| SEQ ID NO: | CGCTCATAACATGGCGCAATACGGCATATCAACTAACGTTGTGGATA |
| 1068 | TTTCTCAATCTCAGTTGGATAAATGCCGACAGATGATCGAAGCGAAC |
| | TTACGCTTATATAATTTTCACCCGCAGCATAAAAAAAAGACGCATAG |
| | CACAGCGGAGATAATGGAAAATATCCGTTTCACAACTGAGTTGGACG |
| | ACATTGTAGAATGTGATTTGGTGATTGAGAATATTACTGAGGATATA |
| | GAGAAAAAAAATGCACTATACACACGGATGAATACGATCTGCGGCG |
| | CGTCGACAGTGTTTGGTGTTAATACGTCCGCCATATCTATCACTGCGT |
| | TGTCAAAATTAATGCGACATCCGGAGAATGTAGTCGGCGTCCATTTT |
| | ATGAACCCGGTACCGCTGATGCACACCGTCGAATTAATCCGTGGTGT |
| | ACATACTGCAGAGCGTACACTGAACATATTTCACCACTTATTTGCTCA |
| | GTTGAATAAAACCGGCATCGTGGTCAATGATTCTCCGGGCTTTGTCAC |
| | TAATCGTGCCATGATGATTTTTGTTAACGAAGCCATATTTATGGTGCA |
| | GGAGCAGATCGCCCGTGCTGAGGATATCGATACGTTGTTTAAAACCT |
| | GCTTCGGGCACAAGATGGGGCCACTACAAACTGCCGATTTGATTGGC |
| | TTGGATACGATTTTGCAATCGTTGCAGGTGCTATATGAAAGTTTTAAT |
| | GATGATAAGTATCGCCCCAGCTTTTTATTAAAGAAAATGGTCGATGC |
| | AGGGTATTTGGGCGTGAAATCAGGGCAGGGGTTTTATCGCTATCAAC |
| | AGACGTACGCCGAGCAGTGA* |
| clbE | ATGAAAAAGCAAGATATGAAAGCCGCCATTCGGGAATTTCTTTCACG |
| SEQ ID NO: | CTCATTACGTGGGCATACGTTGAACGATGATGACGATATTTTTTCTCT |
| 1069 | CGGGCTTGTCCATTCGTTATTTACTGTGCAAATCATACTGTTTATAGA |
| | AAAAAATTTTCAGGTTGAGCTGGAAGTGAGTGAGTTGAAAACAGAAC |
| | AGATTGCTACCGTCAATAAAATAGTGGAGCTCATTCAGCGACAAACA |
| | GGCCTGGAGTAA* |
| clbF | ATGTGCACTGAAAATTATGAGCTGGCTCAGCAAGAGGCAGTCCTGTT |
| SEQ ID NO: | TGCCAAACAACATCTCGCCCTGGCTGCACAGAATATTGAACGTCAGC |
| 1070 | AGTTTATTGTGCCAGACATTATTTCTTGCGTGGCGCAGGCCGGGTACT |
| | TAGGTGCGTCAATCCCCCAAAAATATGGCGGACGAGGTTACGATTCT |
| | TATCAACTGTGCGCTTTGCATGAAGTGATGGCTGGGGTTCACGGTTCG |
| | TTAGAAAATCTCATAACAGTGACTGGCATGGTCAGCACGCTGCTGCA |
| | ACGCGTGGGCAGCGCAGCGCAAAAAGCCCATTATTTGCCAAAGCTGG |
| | CAACGGGGGAATTGATCGGCGCGATTGCCCTCACAGAGCCGAATATC |
| | GGCAGTGACTTAGTGAACGTGGAAACAGAATTACAGCAGGATGGCG |
| | ACGGTTGGCGGCTGAACGGGAAAAAGAAATGGATCACGCTAGGGCA |
| | GATTGCTGATTTTTTTATTGTTTTAATCCACTGTGGTAATCAATTAGCG |
| | ACAGTGCTTATCGATCGCAATACCGACGGCTTTACTATCACTCCACTC |
| | AACGACATGTTGGGGTTACGCGGCAATATGTTGGCAGAGCTGCATTT |
| | TAATGACTGCCGCCTGAAGGAGGATGCATTGCTCGGTCCGCTCACCC |
| | CTGGGGTACCGCTGGCGGTGAATTTTGCGCTCAATGAAGGGCGGTTC |
| | ACCACCGCTTGTGGCAGCCTAGGATTATGTCGGGCCGCTGTGGATGT |
| | GGCAGCGCGCTACATCCGCCAGCGTAAACAGTTCAAGCGGCGGTTAT |
| | TTTCTCATGGCATTGTTCAGCACTTGTTTGCCACAATGCTGACCCAAA |
| | CGCGCAGTGCGCAACTAATGTGCTTCAGCGCGGCGGAATACCGCGAA |
| | ACGCTGCACCCGGCCATGATAAACCAAATCCTGATGGCGAAGTATGT |
| | CGCTTCCAAAGCTGCGGTGGACGTGGCCGGGAAGGCGGTGCAACTGC |
| | TCGGTGCGAATGGTTGCCATGCCGATTATGCCGTCGAACGTTACTACC |
| | GCGACGCCAAAATCATGGAAATCATCGAAGGGACATCGCAAATTCAT |
| | GAAATCCAAATTGCGATGAATTACATGATGGGGAGTGAAGCATGA* |
| clbG | ATGACGAAGGATGTCGCACTGATGTTCCCTGGCTCCGGTTCGCAATAT |
| SEQ ID NO: | GTAGGCATGGCACGGTGGCTGTATGAGCGTTATCCGCAGGTGCGTAC |
| 1071 | TCTGTTTGATGAAGCTAGCCAGATCACGGAACGGGACATGGCAGCGC |
| | TGTGCCTGTCGGGTACTTTGGTACAACTTGCTGAGCCGACGGCAATG |
| | GCGCTGGCTATCTATACCACCAGCGTGGCCCACTTTGTCGCGTGGCAG |
| | CAGTTTTTGGCGCAAACCGGTGTCCATGTCAACCTACGTTATATGTTG |
| | GGTCATAGTTTGGGCGAATATGCTGCGCTGACCTGTAGTGGTGCGCT |
| | GAGCTTTTCCCAAGCACTGGCGCTGGTGGCGATGCGTAGCCGTTTAG |
| | CCAGTGAGATCGCCCGCGAAATGGACGCGAGTACCACTATCATCAAG |
| | CAAGGGAATCAGGCACTGGTGGCAGCGGCGTGCGAGGTGGCGGAGC |
| | GTGAAACCCGACAGCAGGTCGGTATTGCCTGCTTCAATTCGCCGCAA |
| | CAGTTTATGTTATCCGGACAAAACTCGGCCATTATCGCCGCCGAGCA |
| | ATACCTGCTGGATCATGATCGCCAAGTCGAAGTAGTGCCGCTGATTG |
| | GTGGTGTTCCTTACCACAGCCCACTATTGAAACCTTGCGGACAGCAAT |
| | TGCGCAAGGCGCTGGATCGCTGCGAATGGCGACGTCCGTGCTGCCCA |
| | GTGATCTCCAATGTCAACGCTCAACCCTATCCCGATACGGTCACGCCA |
| | GTCCAGTGGCTAGAACAACAGCTCTCTCAGCCAGTGCAGTGGCAGCG |
| | CTCTCTCACCTACCTGACAGGACACTTGTCACCGATCGCGATAGAGAT |
| | CGGTCCGCAAAGTGTGCTGAAAAACCTGCTGCTGGAGAATCGCTATC |
| | CAGCACCAGTTTACGCATTTGACAATCGTCATGATCGTGCGCAACTA |
| | GCATTGGTGCTGGGGGATAACATGGCGGTGAAGACCGATCCGGAAGC |
| | CGTGCGCCGCCAACGCATCACGCTGCTCACTAACGCCCTGACAGCCA |
| | CACGCCATCACCGCGCCGCCGATGTGGCTGCCAGTGCGCAATTGAAA |
| | GAATTGCTCAGTCGTTTTTTTGAGCGCATCCAGCAGATTGAGCAGCGC |
| | GGCACATCCAGCGAAGAGGACATTGCTTTTTTGCATGAGCTTCTTGAA |
| | CAGGGATTTCAACTCAAAGGCAGTAGTCAGGCAGAAATCGACGCCTG |
| | CCACGCGCGGTTGGCTTCCGACAACGGCGGACAGGCGTAA* |
| clbH | ATGGAACAGCAAGGGATTATGAGACAGTTGCCTACCGACGACCAAAC |
| SEQ ID NO: | GATAGTCGACTATTTGTATCGTATCGCCGGAGAATATGGGGAAAAAG |
| 1072 | CCGCTGTATTGATGGGGGACGCGGCGCTGAGCTATCACGATCTTAAT |
| | GCACGCTCTAACCAACTGGCGCATTATCTGCGTGGGCTGGGGATCGG |
| | CGAGGATCGTGTGGTAGCTATCCGCCTGCCGCGCGGCATGGCAATGC |
| | TGATTGCCATTTTCGCTATTGTAAAAGCTGGTGGTGCCTATTTACCGC |
| | TGGCGTACAATGCACCGCGCAGCCGCATTGAAAATATACTGAGCAAC |
| | AGCGGCGCTGTTTGTCTGATCGGTACTGACGATGGTGATCGCTGGCC |
| | GATTCCTCGCGTCGAAATCGACAGCGCGGCGGTCAGTGCCATGCCAA |
| | CGACGGATCTGCGTTACCGACCACATGCGCGGCAACTGGCGTATATT |
| | ATTTACACCTCCGGTTCCACCGGTGTCCCTAAAGGGGTGGCGACGGA |
| | ACATGCAGCGCTGCTAAACCGAATTGTCTGGATGCAGAACGCTTATC |
| | CTATCAGTTCTCAGGACGTGCTGTTTCAGAAGACGGTGTACACCTTTG |
| | ACGTCTCTGTCTGGGAGATGTTCTGGTGGGCGATGTACGGCGCATCTG |
| | TAGTGCTGTTACCGTCCGGACTGGAGAGCGATCCGCGAACCTTGGCT |
| | CGACTGATTCAGCGTCACCGCGTGTCGGTTGTGCACTTTGTCCCTTCG |
| | ATGCTGAACCTGTTTGTCGAGTATCTGGAGATGAAACAGGATCCTCG |
| | TTTGACCGCCTCATTGCGATTAGTGTTTTCCAGCGGTGAGAAACTCAC |
| | GGTCCACAGTGTGGCTCGCTTTTATCAATCGGTGGCGCAGGGTGATCT |
| | TATAAATCTCTATGGCCCGACCGAAGCAGCAATCGATGTCAGTCATC |
| | ACCGCTGCCTGCGCGGGTACGACTACGACGATATCCCTATCGGTCAA |
| | GCGATTGACGGTTGCCGACTCTATGTGCTGGATGACCATGGTAATCC |
| | GGTAGCAGACGGCGAAGAGGGCGAACTGTATCTCGCTGGTATCGGGC |
| | TGGCACGTGGCTATCTCAACAACGTGGCGTTAACTGATCGCTGTTTTA |
| | CTATACATCCAACTTTGCGCCATTTAGGGAAACCGGAGCGGCTGTAT |
| | AAAACTGGAGATCTGGTGTGGCGCGACGGGGAAAGCCAACAAATTC |
| | ATTACATTGGCCGTAATGATTTTCAGATTAAAATTAGAGGGTTGCGCG |
| | TTGAATTGGGAGAAATCGAAGCCCATGCGATGCGTTTCCCGGGGGTA |
| | CAGCAGGCAGTCGTGGTGGCGGATCAGGATGATCCCGACAATCAGTT |
| | GATTTACGCTTTTGTCGTCAGTAGCGTGCCGCTCAATTTGGCGGCCTT |
| | AATGGACGCACTGTCCAAAAACTTGCCTGCCTACATGCTGCCGAACC |
| | GTTTGTTGGCAATGTCAGAGTTACCACTCTCCGACAATGGCAAGTGCT |
| | GTCGTAAAACGTTGCTCGACTTGGCGCGGGCGTACTCAGCCAGTCGC |
| | GTCGATTTACGTGAAACTCCCGCCGTGCGCTACCTACCGTTGTCATCG |
| | GCTCAATCGTCGATGTGGTTTATGCAACAATTGGCGCCGCATACTGCA |
| | CTATACAATAACCCCACCGCCTTGCTGCTTGAAGGAGAACTGGATCG |
| | CACGCGGATGGACGGCGCGATTCGTCAATTGATGAGTCGGCATACTC |
| | TGTTACGTGCTATGGCGGAAACCCACAATGGACAACCAGTATTGGCG |
| | GTGCCTCAGTGCGTATCGTCGCAGGCGTTGCTGACCATAGTGCCACTC |
| | CCCTCGGTGAGTGATGATAACGCGCTACAGGCGATGATCAACCAGCG |
| | TGCGGCACACCCCATGCCCTTAACGTCAGGCACACCGCTGTGCCGGT |
| | TTGAACTGTTGACGCTCGATGACGATCGTAGCGTATTGTTGATTCATC |
| | TGCACCACATCATCAGTGATGGCTGGTCGAAAGGCGTTTTGTTACGC |
| | GAATTGCAGGCCGCATATAACGGTGAATCGCTGACGCCAGAACCGTT |
| | GTTGGAGTATGCCGACTACATGGAGTACCAAGAAGAGTGGCGTCAGA |
| | GTGACGCCTATCAGGACGCGATGCGTTACTGGCAAAATACCCTGGCG |
| | GGGACGTTGCCGATTCTTGATATCCCCACCGATCAACCGCGTCAGAA |
| | GGTGGCACGTTACCAAGGCGCGTTTGTTGCCTTCGCATTGTCTGCCAA |
| | CACATGCGAGCGAGTGTTGGCGGCGGCGCGTGCGCAGCGCGTGTCGT |
| | TGTATAACTATCTGCTGACCGCCTTCGTCCTCCTGCTGCATCGTAATG |
| | CGCGTCAACAGGAATACATCGTCGGTATGCCGATTGCTGCGCGGCTG |
| | ACGAAAGAACAGGAGCATATGATCGCGCCGCTGGTCAACGTACTACC |
| | GCTGCGCTTACCTCTTGACGAAGCGGCATCGTTTTCCGAGTTAGTACA |
| | GACGATCAGAGGTATTCTGTTTGCCGCTTTCAGGCACCAGCGTCTCGA |
| | ATTTACCGACATAGTGCGCGCAGTGAATGTGGATCGCAGCGCCGGAC |
| | ATTTCCCAATATATCAGTGCATGTTCCAACTCGACAATATGCCTCTGG |
| | CGAGCCCGACACTAAACGGTGTCAACGTTACACCATTATTGTTGGAT |
| | ACCAGTGCATCTCAGGTGGATATTTCGCTAAGTATGCAGCATATCGAT |
| | GGGCGCATCACCGGCACTTTCGAATACGACGCTGGGTTATACAGTGC |
| | GGATCGTATTCAGCACCTGGTGGCGCAGTGGAGAGAACTGCTAGATG |
| | AGGCCAGCAGCCAACCCACGCAGTTAGTCCGCGATTTGATTCGTTTC |
| | ACCCCTCGAGAGCACGCTTGGCTGGCGCGGCACAACGCCACTGAAGT |
| | TGCTCTGCCGCCCGTAGATAACCTGCTGGCGCTAGTGTTACCGCACTG |
| | CCAGCAGCGCCCTACACAGGTGGCTTTGCGCCACGCTGACGACGCCA |
| | TGACCTATGGCGAATTGCAACAGGCCACGATGCAGATGTGTACTTGG |
| | CTGCGTGCGCAAGGCGTAAAACGCGGAGAATCTGTCGCACTGCAACT |
| | GCCTTTTTGTTTCGAATTGATTATCGCACAATTGGCGATCCTCTCTTTG |
| | GGGGCGAGCTATGTGCCGCTGGATGGTAACGCGCCAGCGGCCCGCAA |
| | TGCCCTGATCTTGGCGCAGGCAACGCCGTGCATGCTGCTGGTGGCGC |
| | AACCGCTGGAATCCCCTCATGGGCTGACGATACCTTGGGTGCTAGTG |
| | CCTGACTGGCGTAGCCTGCTGACAGAAATACCGAACCTGCCAGTTAG |
| | TGTTGCGCCAGATGCTTTAGATTGCGATGCGGTGGTGATCTTTACCTC |
| | CGGTACTACCGGGCAGCCCAAAGGCGTCCGACTCAGCCAACGTAATC |
| | TGGTCAACTTAACCGCATCCTTTATATCCAGCTATCAAGTGACGCATC |
| | AGGATGTTTTGCTACCCATTACCTCAGTCGCGTCTGCTAGCTTTGTCG |
| | GGGAGGTACTGCCGCTGCTCGCCGCTGGCGGTACCTTAGTATTGGCG |
| | CAAAAAGCGCAGAGTTTGGATAGTGATGCGCTCATTGCGCTGCTGGC |
| | ATCTCAGCGGGTGACTATCCTGAGCACCACCCCATCGCTTTCTGCCAG |
| | CCTCTCTGTGCTGGCTCAGTCGATGGGATCGCTGCGCTTGTTTCTGTG |
| | CGGTGGTGAAGCGTTAGAGTATGAGCAGATAGCGCCGCTTCTGCCGC |
| | ACATGGCAGTGGTTAACGGTTATGGCCTGACCGAAAGCGGTATCTGC |
| | TCGACCTACTTTCCTGTCGCAAAGCGTAGGGAGCAAGAAACGGGAGC |
| | ATTGCCCATTGGCCGCCCGATTCAGAACACCCAAGCTTATGTGGTGG |
| | ATGCATATAATCGTTTGGTACCGCCAGGTGCCTGTGGAGAACTCTGTT |
| | TCTCTGGTCTGGGCATTTCGCCCGGCTACCTTGATGCACGACAGGATC |
| | CCGAGCGCTTTGTCGAGTTGCCGGAATACCCTGGCGTTCGGGTGCTG |
| | AAAACTGGCGATCGTGCTCGTTGGGCAACCGACGGGATGTTGTTCTA |
| | TCTCGGCAGACAAGATCGCCAAGTGCAGATCCGTGGATACCGAGTTG |
| | AACTGGGCGACATCGAAAGCCTACTGAAACAGCATCCGGATATTGCT |
| | GATGCGTGGGTCGATGTGCGACGCAATGCGGCGGCAACGCCGCTACT |
| | AGTGGCCTTCTATTGCAGCGTCAACGGCGTTGCGCTGGATGCTCAGC |
| | AATTGCGCGTATGGCTCAGCCTGCGGCTTCCGTTGCATATGCTGCCGT |
| | TGCTCTACGTGCCGCTGAGCGCCATGCCGCTAGGTGTAAACGGCAAA |
| | ATCGATCCCCAGTGCCTGCCGCTGGTCGATCTGCGGCAGTTGGAAGG |
| | GCCGGGCGAGTATGTCCCTCCGGCAACCGAACTGGAACAGCGTCTGG |
| | CGGAGATCTGGCAGCAGTTGCTTGGCCTGGAGCGTGTCGGCACCACC |
| | ACAAATTTCTTCGATCTCGGTGGACACTCACTTCTGCTAGTACAGATG |
| | CAGCAATACATCGGGCAGCAGTGCGGTCAGCACGTGGCGTTGGTTGA |
| | CCTGCTGCGCTTCACTACCATCAAACGCTTGGCGGAATTTCTGCTGGC |
| | CCCGGACGCAGCGCAAGGGACCACAGGAGATCAGACACAACTGCGT |
| | GCGGCGAAGCAGCGTTTGGCCTTTGGTCACACGCGCTGGGCAGCCAC |
| | AACCGACAGTCATCACTGA |
| clbI | ATGGCAGAGAATGATTTTGGTATAGCTATCATTGGGATGGCGGGGCG |
| SEQ ID NO: | TTTCCCTCAAGCCGATACGGTACAGGCGTTTTGGGAAAATCTTCTGGC |
| 1073 | AAGCCGAGAGTGCATTTCCTTTTACAGCGATGAGGAACTGCTGGCGA |
| | TGGGAATCAGTCCTGAATTTGTTCAGCACCCAGATTACGTCAAGGCC |
| | AAAGGGGAGGTAGCTGACATCGATAAATTTGATGCTGCTTTCTTCGG |
| | TATCGCACCCCGAGAGGCGGAGCTGATGGATCCTCAGCACCGTGTCC |
| | TGTTGGAAACCGCGTGGGCAGCCTTCGAAGATGCGGGCTATGTGGCT |
| | GCCGATTATCCGGGGGATGTGGGTATTTTTGCTGGCAAAAGCATGGA |
| | TTCCTATTTGATGCTGAACTTGATGCCGCACTTTAAACGCGTTTTCTCT |
| | TCTGGCAGTTTGCAGGCGGCCATTGGTAACGACAAAGACAGTATCAC |
| | TACTACCATCGCCTATCACCTCAACCTGCGCGGCCCGGCGATCACGGT |
| | GCAGACTTCCTCATCGACATCCTTGGTGGCGGTGTGCGTGGCATGCCA |
| | AAGTCTGTTGACTTGGCAGTGTGACATGGCGATTGCTGGCGGAGTAA |
| | CGCTGGGGCCACCAGCAAAAACCGGCTACTTGTCGCAGGAAGGTGGG |
| | ATCACCGCCGCCGATGGCCACTGTCGGGCGTTTTCCGATAACAGCAG |
| | CGGATTTGTGCCCGGCACCGGCGCGGGGCTGGTGGTGTTAAAGCGTG |
| | TTGATGAAGCGCTGCGTGATGGCGATAACATCTATGCGGTCATCAAA |
| | GGATTTGCCGTCAACAACGACGGTTCGGAGAAGATCAGTTATACCGC |
| | GCCGAGCGTGGATGCCCAAGCGCGCGCCATTGCTCAGGCACAGCGGT |
| | TGGCAGGTTTGACACCGCAGGATATCACTTATGTGGAAGCCCACGGT |
| | ACCGGTACGCGTTTGGGCGATCCGGTTGAGTTTTCTGCGCTAAGCCAA |
| | GCCTTTGCGGGCGCGTCACAAAAGCAGTACTGTGCGCTGGGGTCGGT |
| | AAAAACCAATATCGGCCATTTGGATACGGCAGCGGGCGTCGCAGGGT |
| | TGATAAAAACCGCGCTGGCAGTGCAGCAGGGAATAATTCCCGCAACA |
| | TTGCACTTTGAACGGCCCAATGCACAGATCGATCTGACCAATAGTCC |
| | GTTTTACATCAACACTACCTGTCAACCGTGGCAACCGGAAAGCGGCA |
| | TCCGTCGCGCGGGCGTCACCTCGCTTGGCATGGGCGGCACCAATGCC |
| | CATGTTGTGCTGGAACAAGCGCCAGCCGTTGACTTGCAAGCGCGAGC |
| | GCCTGTACCTGCCTACAGTATTTTGCCGTTTTCTGCCAAGACCGACAG |
| | TGCCTTATCCTCGGGGCTGGCGCGTTTTGCCGATTTTCTGCAACATGA |
| | ATCGCTGCCGGATAGGCGGGATCTGGCGTGGACACTCTCACAGGGAC |
| | GTAAAGCCTTCGCACATCGCGCCGCGCTCGTAACCAGAGATCTACAT |
| | GCTGCCGGGACGCTGTTGCAGCAGGCCGCGACAGCGCCGTTTGCTCG |
| | TGGTGTAGCGCAGACACAGCTCGGGCTGGGGCTGTTGTTTTCCGGGC |
| | AGGGTAGCCAATATCAGCGCATGGGCCATCAGCTCTATCAGGTTTGG |
| | CCGGCCTACGCCGATGCCTTCGACCGTTGCGCGACGTTACTCGAGCGT |
| | GAATACCAACTGGATATCCGCCATGAGTTGTTCAGAGCAGAAGTCTC |
| | GTTAGCCCAAGGCGAACGCCTTGCGCAAACCTGCCTCACACAACCGC |
| | TGCTGTTCAGCGTCGAGTATGCCTTAGCCCAATTGTGGCTCAGTTGGG |
| | GAATCACGCCAACGGTAATGATTGGTCATTCGCTGGGCGAATGGGTG |
| | GCAGCGACGTTGGCAGGCGTGTTCTCTTTAGAGGATGCGTTGCGCTTG |
| | GTGGCGCGTCGAGCAGAGCTGATGCATCAGGCACCAAGCGGTGCCAT |
| | GTTGATGGTGGCGCTGCCCGAAGCACAGATTCGCGCACTGATTACCG |
| | CCCCGCTGGCGATTGCCGCTGTTAACGCCCCTGACTATTCGGTTATCG |
| | CCGGGCCTACGTCGGAGATCCTCGCCGTCAGCCAGCGTCTGACGGAG |
| | CAGAACATCATCAACAAACGATTGCATACCTCTCATGCCTTCCACTCT |
| | AGCATGATGCAAGATGCGGCGCAGGCGCTACGTCAGGCATTTGAGAA |
| | TGTACGACTGAACCCGCCGACGCTCACCATCATCTCTACCGTAACCG |
| | GCGCGCACGTCAGTGCCGACACTCTCACCACACCGGACTACTGGATT |
| | GAACAGATGCTGATGCCTGTGCAGTTCTCCGCTGCACTGCAAGAGGC |
| | GCAAGCTACATTTGATGTCGATTTTCTGGAAATCGGGCCAGGTGCCA |
| | CCCTGACCCAGCTGACCAACGGTCATGCATTAGGTGATCGTCTCGCGT |
| | TCAGCTCGCTGCCAGCAGGTGCCCGCAGCAGCGATGAGCACAAACAT |
| | ATCTTAGATACCGTGGCAGCGCTTTGGGTGCGAGGGCATAACATCGA |
| | TTTGTCTGCGTTTGCAGGTGAGCAACCGCGCCGTGTCTCTCTACCGAC |
| | CTACGCCTTTGACAAAATCCGTTACTGGGTCGACAGTCCAGAAGAAC |
| | AGAGGAGCGCCGTAACGCCGGTGGCGGACGCGGGAAGTGTCATCCCT |
| | AGCGAACCGTCGGTGCGCCGTCAGCCGCGTCCGGCGTTTTCGGTGCC |
| | TTACGCGGCTCCAGAGAGCAAAACGCAGCGCGGCTTAGTGGCGATTT |
| | GTGAAGCATTGCTGGGAATTGACGGCTTGGGCATTGACGACAACTTC |
| | TTCGAAGCTGGCGGACATTCATTGATGCTGGGCATGTTGCTGGCGCA |
| | GGTACAGGAACGGTTCGCCGTCACTCTTTCCTTTTTCGACGTGATGGA |
| | GGATGCCAGCGTGCGCGCGTTAGCGCAGTTGGTCGAGCAGGAGCAGC |
| | AGGATGATGGAGGGTCCGCACTTGCCGTGCTAGTTAACGACATGATT |
| | AATGAGTGA* |
| clbJ | ATGACGATACATCATGCCGCATTGGCGCGAATGTTACCGGCGGAAAA |
| SEQ ID NO: | AAAGGAAAAGCTATTACGACAGTTGGCGCAATCAGGCGTGTCGCCCA |
| 1074 | GCCGCATTCCCATCATCAAAGCGGATCCGGCGCAGGCAATCCCGCTG |
| | TCGTTTAATCAGGAGCGGTTGTGGTTTTTGCAAAAATACGACAGTACC |
| | GCCACTAACTACAACCTTTATGTGGTGTATCGTTTGCATGGCGTGGTG |
| | GATATGCCGATGCTCACGGAGGCATTGCGCCATGTGCAAGCACGCCA |
| | CGCCATCTTGCGTACCCGTATCATAGTACGTAACGATCGGCCTTGCCA |
| | GGTGATAGATGATGCGTCTTCGTTAGTTCTCGATACGGTCACGCTGGC |
| | AGCGCAGGCCCCAACTTCAGCGCTAGATGCGGTAATTCAGCAGGTGA |
| | TAAACACCCGGTTCGATCTGGCACGCGGTCCTCTGTGGGGGGTAACT |
| | CAGATTATTCAACCCGATCAAGGTTGTCATTTGGTGTTTTGCGCGCAC |
| | CATATCATCATCGACGGTATCTCGTTACGGCTATTGTTCGATGAGTTA |
| | CAGCAGCAGTATGCTCGATTGCATGCTGGTAATGAAACGTCGCTGCC |
| | TCCGCCGCCGCTGCAATATGCCGATTATGCCTTCTGGCAGCGCGAATG |
| | GTTCCAGGATACCTTGCTGGCGAACGAACTTGCCTACTGGCGTGCGC |
| | GTTTGCAAGACGCGCCTCTGCTGTCGACATTTCCATCGCTGCACCCGC |
| | GCCCGGCACAACCCTCTACACATGGTTCCCGGTTCAGCATCACCCTGG |
| | ATGAAACATTAAGCCTCGCGTTGAAACACGTAGCCCGCACGCAGGAA |
| | ACAACGCCGTTCGTGCTGATGCTGACTGCCTTCCAACTGGTGCTGATG |
| | CGTTACGCTCAGCAACAGCGATTGGTGATAGGCATGCCAGTATCGGG |
| | GCGCATTCGCCCGGAATTGCAGAGTAGCATTGGTTATTATGCCAGCA |
| | CTGCGGTTATCTACACCGATTTTAATGGGGTTGAGGTAGGGCGCGAG |
| | GCGCTCCAGCGTGTGAAGGCCAGCGTGAAAGAGACGCAGGGGCGCC |
| | AGCAACTGCCGTTTGAAAACTTGGTGAATATGCTGGATCTCCCTCGCA |
| | GCCTTTCCCATTCACCGTTGTTCCAGATCCTCTATATCTACCATAACC |
| | ACGTGACCCCACGCGCTTTTACCTTGGCTGGTGCGTATTGGGAGCAG |
| | GTGACGTATCACAATCAGACCGTCAAATACGACATGACAGTCGAGGT |
| | GTTCCAAAACGACGCCACGTTCGACGTCTCCTTTGAGTACGATTTGGG |
| | GTTATACGATGCTGATGTGGTGAAGCAGATTGCCGAGGCGCTGCGTC |
| | AGCACTGCTTATCGTTGACATCATCACTGGAGACCCCGATAGGGGCG |
| | ATCCCTCTGCATGCACCGGAGACCGCAACGCCGCGGCGTGATCCGCT |
| | CAACGCCACTAACGTCCCGTGGCTCGGGCCGCAGGATGTGCTGCGTA |
| | TCATTGAACAGCGCTGTGTGCAGCACCCAAAGCAACTGGCAATACAG |
| | CAGCATGACGGCACACTGACCTACGCTGAGCTCTGGGCGCGTGTGCA |
| | GTTCATCGCGATGCGTTTTCGAGCGCATGGCATACAACCGGGCGATC |
| | GTATTGGCGTGCTGTTGCCACGTCACAGGGATGTGATTGCAACCATGT |
| | TGGCGACGTGGTTTGTGGGGGCGTGCTACGTGCCGTTCGATATTCATC |
| | AGCCTGCCGCGCGTTTGCAACGCCTTATGCAACGCGCGCGTTTGGTCT |
| | GTCTGGTGGTCCGTCAGCCGGGAGAGTGGGGTGAAATTGTACAACTG |
| | TCGTTGCCGGAATTGATGCAGGACATGTCGAATGCGATCCGGTATTCT |
| | ACACCTTGCGCGCTGTTGCCGGATATGCAGGCCTACCTGTTGTTTACC |
| | TCCGGCAGTACCGGTGAACCTAAAGGCGTGTGCGTTGTTCACCGCGG |
| | GTTGCTGAACTTGTTGTTGGATATGCAGCGTACCTTTGCGGTTGGCTC |
| | GCAAGACCGGCTGCTCTCGGTGACGACGCCAACATTTGATATCTCATT |
| | CTTGGAGTATCTGTTGCCGCTGATCTCCGGTGCGAGTCTCTATCTGAC |
| | AGAGGCGGAACGCGCCGCAGACAGCTTCCGTATGATTCCGCTGATTG |
| | CCGACTATCGACCAACGCTGATGCAGGCGACGCCCTCGTTCTGGCAC |
| | GGGCTGTTGATGGCGGGTTGGCGTGGCGACCCGGAACTATGTGTGCT |
| | GGCAGGCGGTGAAGCGCTGCCAACGAAAGTGGCGGAAGAACTGTTG |
| | CGCTGTTGTGGTTCATTGTGGAACCTCTACGGTCCCACCGAAACAACC |
| | ATTTGGTCGCTGAAATCGCAGATAACCCAAGCGGAAAACATCACCCT |
| | CGGCGCTCCCATTGCCAATACCCGTATATACATTCTGGACAATGAGG |
| | GCCATCCAGTGCCGCAAGGCGTTGACGGCGAGCTTTACATCGCCGGG |
| | GATGGTGTGGCGCAAGGGTATGATGGGCAGCCTGAGTTGAACGCACA |
| | GTTCTTCTTGTCAGAACCAGGGGTCCCCGGTGGCAGGATGTTCCGCAC |
| | TGGCGATCTGGTCAGGAGTGATGCGCAGGGGCAGTTGTTTTTTGTTGG |
| | GCGCAAAGATAGCCAGATCAAACTGCGCGGTTATCGTATTGAGTTAG |
| | GCGAAATTGAACGGACGTTGGCACGGCATCCGCATGTGGACGCCGCG |
| | GTGGTGGCCTGTATTGAAAGAGCACCGTTACACAAAGCACTGGCAGC |
| | ATTCATCATCACCAGTGAGCCTCCCTCGCTATTCGAGCAACTGAAAA |
| | ACGAGCTTCGGCAGCAACTGCCAGACTATATGGTGCCAACGCTGTGG |
| | CAGAGGGTGGCCGACTTCCCGAACACTGACAACGGTAAAATCGATCG |
| | TAAGCGGTTAGCGGAAAATTTCGTTGCCGATAGCTCCCTTGTGTCGCC |
| | GCAGACGCAAGCGCTGAGCGACACGGAACAGATGTTGCTGGCGCTGT |
| | GGATGCGCTATTTGCCGATAAAAAACGTCGATCCTGAGTGCGATTTCT |
| | TTCGCTTGGGGGGACATTCGCTGTTGGCGGTAACGTTGGTAGCAGAG |
| | ATCAACCGCACTTTTCACTGCGCCTTGACCCTGAAGGACATTTTCCAC |
| | TACTCCACACTACGGGCACTGAGTGCGCGTATTGCACAGCAATCTAT |
| | CACGGACGCTGCCGCGTCTCAGGATGACTGGGTGATAGTGCACGACC |
| | CTGAGCATCGTCATCAACCGTTCCCATTGACGGATGTTCAGCGCGCCT |
| | ACTGGCTTGGACGACAGACGGGTGCTACCTCGATCGCGACCCACATC |
| | TACCATGAATTTGACGTAGAACACTTTAATGTTACGCGTTTTACCCAT |
| | GCGGTGAATGCGCTGATCGCTCGCCATGAAATGCTACGTGCGCGGGT |
| | ACTCCCCGACGGTACTCAGCAGATTCTGGCGCAAGTGCCGGCGTATC |
| | AGTTAGAGCAGCGCGATCTGAGTGCTTTGTCCCCTAACGCACGAAAC |
| | GATGCCTTGATGGCGATCCGCGATCGGCTGTCGCATCATGTGCATCCC |
| | GCAGATCGTTGGCCGCTGTTTGATTTCAGTTATTCGGCTTGCACGGCG |
| | CAACATGGCCGCTTGCATTTCAGTCTCGATCTGCTGATTGCCGATGCT |
| | CTGAGTATGCGCACGCTACAGCAGGAGTTGATGATGCTGTACCGTGA |
| | GCCCCATGTGTCACTGCCGTTGCTACCGTTCTCTTTTCGTGACTACGT |
| | GCAGGCGCTGTTGGTAGAGCAGGCGAGTGAAGCCTATGCACGCGATC |
| | AGGCCTATTGGCAACGGGCGCTGCCGCAGCTGTATGGCCCACCAACG |
| | CTGCCCGTACAGGGCGATTTGGCGCAACTGTCTGCGATCAGGTTCGT |
| | ACGTCGCCGTCATCGGCTGTCAGCCCACAACTGGGGAGTGCTGAGCG |
| | CGCTGGCCCAACGCACACGTATCACCAAGACGGCATTGTTGTTGACA |
| | GTCTTTAGCCAAGTGCTGGCACGTTGGAGCCTTAGCCCGACGTTTACG |
| | CTCAATCTGACGTTGTTCAACCGCCCGCAGGGTTACCCCAACGCAGA |
| | GGCAGTTATTGGTGATTTTACCGCTGTCAGCTTGCTGAATGTTTGTTA |
| | CGACAGCCAGCACTCTTATGCCCACAACGCTCAGCGTATTCAGGTGC |
| | AACTGTGGGAAGATCTCGAACATCGTCGTTTCAGTGGGATCCGCGCC |
| | AGCGAGGCGCTGATCCATAGCGGTCGTTTCCATGCGCCGATGCCGGT |
| | GGTATTCACTAGTATGTTGGATATCGACGGGGAGACGACTGCGCAAG |
| | ACCCTCGGGACACAACCCGTTTTACTCTGTGTCCGGACGCCAATATTA |
| | CCCAAACACCGCAGGTGTGGCTCGATCACCAGGTGATCGAGTTGGCT |
| | GGGGAGTTGCATTTCAACTGGGACGCGGTCGAGCAACTGTTTGATAC |
| | CACGCTGCTGGATCAGATGTTTGGTGCTTATTGTCATGCGCTGCAGGC |
| | GCTGGTTGCCATGCCGCAAAGTTGGTGGGGGGTAAATAGTTCTCTGG |
| | CGCTGCCCACCGTTAGTGCACCGGTCACGCAGGCTCCTGCACCTACG |
| | GCCTTGTTGCACCATGGATTACTGCGTCAGGCAGCACTGACGCCACA |
| | GGAAACTGCGCTGATCAGTCCTATCCGTGAATTGACCTATCGCCAACT |
| | GTCGACGGCGGCGGATCATGTGGCCCGCGCCCTGTTAGCGCTGGGCG |
| | TGCAGCATGGCGACCGCGTGGCGGTGGTGATGGAAAAAGGCTGGCA |
| | GCAGATTGCCGCCGTACACGGCATTTTACGACTGGGTGCGGTCTATCT |
| | GCCAGTGGATCCGGTGCTACCGCCACAGCGTCGCCAGCTTTTGCTGA |
| | CGGTGGGCGAGGTGCGGGTACAAGTAACGCAGCCGGGTCTCACGCA |
| | ATTGGAGCCGTCGCTGCCCGTGCTGATCATCGACGACGGAATGCTGG |
| | ACACGCCTGCTGCGCCGTTGCCTGAAGTGGCTGGGGATGTCACGGAT |
| | CTGGCCTATATCATTTTCACTTCCGGCTCCACCGGTACCCCGAAAGGA |
| | GTGATGATCGACCACCGTGCGGCCATGAACACGCTGGAAGACATCAA |
| | CGAACGCTTTGGCCTCAATGCGCAGGATAGGGTGTTCGGGCTGTCAT |
| | CATTGAGCTTTGACCTGTCGGTTTACGATGCCTTTGCGCCTTTTATGGT |
| | GGGTGCAGCGCTGGTACTGCCGGAAGCAGGACGGGAAAAAGATCCG |
| | CGTCATTGGCAGACAGTTATGGCACACGGTCATGTAAGCGTCTGGAA |
| | TGCAGTGCCCGCACTGATGCAGATGCTGTGCGAATACCACAGCGGCG |
| | ATCGGATGAGTTATCCGACGTTGCGTCTGGCACTGTTGAGCGGCGAC |
| | TGGATCCCGCTAACGTTACCGGAGCAGATGCGCGAGCGGCTCAATGA |
| | AACGATGGACATCATCAGTCTGGGTGGAGCGACCGAGTGCGCCATCT |
| | GGTCGGTCTACTACCCGATAGGTGAGGTGGAATCGACGTGGACCAGT |
| | ATTCCCTACGGTCGGGGCCTGCGCAACCAGCCAGTATACGTGCTAAA |
| | TGCGCAACTGGAGGAATGTCCGGTCGGGGTGGAAGGAGAGATTTGCA |
| | TTGGCGGGATGGGGCTGGCACAAGGCTACCTGAACGACGCAGAGAA |
| | AACGGCGGCGAGCTTTGTCTGGCGCGAAGCGAGTGGTGAGCGAATTT |
| | ACCGCACTGGGGATCGCGGGCGCTACTTTGCTGACGGGCAAGTCGCC |
| | TTTTTGGGGCGCAACGATACCCAAGTGAAGGTGAATGGTTACCGTAT |
| | CGAACTGGGGGAAGTCAAAAGCCACCTTGAACAGCTCGACAGCGTA |
| | GGGAGTGCCGCCGTGGTGTGCCACCAGGGACAGCTGTATGCCTTTAT |
| | CACTGCCGCAGAAAACCTGCATCCTGACGATACTGACGCCCTGTTAG |
| | CGCGTGTTCGTGCTCAGTTAGCCGTGCAGTTGCCGTATTACCTGCTGC |
| | CCCAACATTTCTTTCTTCTCAAGGTGCTGCCGATGACAGGCAACGGCA |
| | AAATTGATCAGGCGGCAATGGTTCAAGAGGTTATCCAACGTATGTCG |
| | CAATCTACATCACAGAAGTCGAGGGCCCTCGCGCACGCCTCGCCCTA |
| | TGAACAGCAGGTGGCCGCTCTCTGGTGCGAGGTACTACAACGAGAAC |
| | AGATCGGACTGAATGACAACTTTTTTGAAGCGGGGGGCGGCTCAATC |
| | CAGATCGTGCTGTTGCATCGCCGTATTGAGGAGATTTTTAAGGTTACG |
| | GTACCTATTGCTGAGCTATTTCGCTTAACCACCGTGAAAAGAATTGCC |
| | GGTTATTTGCAGGCTATGCAGGACAATGCACGGGCGGTGAATCAAAC |
| | ACAGCAGCGTGATGCTTCCCGATCCCGCGCCCAGCAACGACTTGTAC |
| | GTCGTCACCAGCGTCAGCGTTAA |
| clbK | ATGACTTACAGTGAAAGCGATATTGCCATTGTTGGCATGAACTGCCG |
| SEQ ID NO: | GTACCCCGGCGTGCACAGCGTTGCGGCATTCGAAACGGTGCTTCGCA |
| 1075 | CCGGATGCAACATTTTGGACCCCAAAGTGACCCCGAGCAACGGCCAC |
| | AATCACATTACGCTGAACAACGTCTATGAGCACATGGCGGAGTTCGA |
| | TGCCAACTTTTTTGGCTACAGCCGTGCAGAAGCAGAAATCATGGATC |
| | CACAGCAGCGCGTATTTCTGACCTGTGCTTGGGAGATGTTTGAACAA |
| | AGCGGTTACAACCCGAAGCAGCACGATGCGCGCGTCGGCCTATATGC |
| | GGGCGTGAGTACCAGCTTCTATTTGCTTACTCACCTGATGAACAACCC |
| | AGACAAGCTTGCACAACTCGGTGGTCTCCAAATCATGGTCGGCAATG |
| | ACAAAGATCATTTGACGTCCCAACTGGCTTACCGCCTGAATATTACCG |
| | GCCCTTGCGTGACGGTTCAGGCCAGTTGTGCCACCTCGCTGGTGGCA |
| | GTGCATCTGGCCTGCGAAGGGCTGCTGAGCGGTCAGTGCGATATGGC |
| | GCTAGCGGGTGGCGTCACGTTTCGCATGGAGGAGCAGCGCAGCTATG |
| | AATCGCACGGTGATGGGCTGCAAGCAGAGGATGGCCTGATTCATACT |
| | TTTGATGCGCAGGCGAGCGGTACGGTCTACAGCAGTGGTTTGGGCAT |
| | GGTGCTGCTCAAACGGGCTACAGACGCGCAGGTGCAAGGGGATAAC |
| | ATCCTTGCCGTCATCAAGGGAAGCGCCATCAACAATGATGGCGGTGC |
| | GCGCAGTGGTTATACCGTGCCGGGTGTTGATGGTCAGGAAGCTGTGA |
| | TGATTGAGGCGCATAGCTTGGCGGAGGTGACGCCGCAGCAAATTCAG |
| | TATCTAGAACTGCATGGCAGCGGCACGCCGTTGGGTGACGCTATCGA |
| | ATTCGCGGCCATCAAACGTGTGTTTGGGACGCCAGCGCCGAATGCGA |
| | CACCGTGGCGTCTGGGGGCTGTGAAACCTAACGTGGGTCACGTAGAA |
| | ATGGCATCTGGCATCACCAGTCTCATAAAAACGGTGCTGAGTCTTACT |
| | AACCGGGTGTTTTACCCTACGCTGAATTTTCAACGGGCTAATCCGCAA |
| | CTGGGGTTGGAGGACAGCCCGTTTGAAGTGGTGTCCCGTTTAACGCC |
| | TTGGCCGGAGGGCACCACGCCACGCACCGCTGGTGTGAGTGCGTTCG |
| | GATTGGGCGGCACCAACGCACATCTGGTGGTACAAGCGCCGTTATCG |
| | ACGCCGCAGGCGAGGGCGCAGCAGATGGGGCCTTGTGTCGTTGTACT |
| | CTCGGCAAAAAACCACAATGCCCTGGAACAGATGCAAAACGCCCTGC |
| | TGGCGAAACTGGCCGCACATCCAGAGATACGCTTACAGGACGTGGCT |
| | TACACCCTGCGTCACGGGCGTTTCTCCGCCCCGGTACGTAAGTGTGTC |
| | ATCGCAGAGAATTGCACCCAGCTAGCCCGACAACTCCGCGACGCACC |
| | GATGGTGGAGGCAACCACGGGTTGCACGATCTACTGGAGATTGGGGC |
| | ACCGTTTCGTTGTTGCACTCGAGACGCTTAGTGACTGGCTGGCGTGCT |
| | CTGAGGTGTTGTCACAGGCGGTGGGACAACTGCTCGAGCATTTTCCG |
| | CTCGAACCAGCCTGTCTGCAAGATCTCTCCCCTGCGCAACGGACGTTT |
| | ATCAGCCAGTATGCGCTGATCGCGTTGATTGACGAACGGGAAACGTT |
| | GAATGTGGTGCTATGCGGCGACGGTGATGGTGGCTATGCTGCCGCCG |
| | TACTACGAGGAGACTGCACACTAGAGCAAGCATGGCACAGGTTGAAT |
| | GCGGGCCAACCGTTTGATGATGTGCCGACGAATCCCCTCTTGCAGCC |
| | CGATGTCTGCTCTTTGATGCTGGACGACGCGGCGAGTGATGCCAATC |
| | GCACCGCGCTAGAGGCGTTAGGGCAGTTATGGTTGGCTGGCGTCAGC |
| | CTAGATTGGCGCTGGGTGGATGCGGCGGAGCGTATGTTGGGCAGTCA |
| | ACGCATCGCCCTGCCGGGGACCGTTTTTACACCGCAGCGCTATTGGGT |
| | CGAGGCCGTACGGCCTGCCACGTTCTCCCACGAATCGTCGAATAATC |
| | TCTTATCCCGCGCAACAAAATCCGATATTATTGCAGTGGTGACGGAG |
| | ATATGGGAACGCACGCTTGGTGTCAGCATTGATGATCACCACGCCAG |
| | CTTCTTCGAACTGGGTGGGCATTCGCTGTTAGCGTCAACCATTTTATA |
| | TGATATTCAGCAACGTTACGGCATCACCTGTACGCTAAGCGCATTCTT |
| | TGCCGATCCCACCATCGAGGGATTAAGTTGCTATCTGCTCGAACAAG |
| | GCGGCAGTGAGACAGCGGTTTCAGCATTGCCTGATACGGTCTTTGCC |
| | CCTGACCAGCAGCACCTACCTTTTCCGCTGACTGACGTGCAACAGGC |
| | CTATTGGGTTGGGCGGCGAAAATCCTTGGGATTGGGCAATATTTCCA |
| | CCCATATCTATGTGGAATATGAACTACAGGGGCTAGATGAAACAGCG |
| | TTCAACCGCGCGCTCAATGCGGTGATTGCGCGGCACAGCATGTTGCG |
| | TGCAATTGTCAACGATGACGGTATGCAGCAGATATTGCCAAACGTGC |
| | CGGAATACCACGTTGCCTTCTATACCACCCAGTGCGAGGATGCGTTTC |
| | AACAGCGTTGCCGTGAGCTGCGTGACACCCTCTCACATCAGATGATT |
| | GATTGTAGTCGCTGGCCTCTGTTTCAGATGGAGGTCGTGGTTGATCCG |
| | CAGCAAAAAGCCCGGCTACATGTATCTATCGACCTGCTGATAGCCGA |
| | TGCATGGAGTCTGGAGTTGTTCATTCGGGAACTAGCTTATCACTACCG |
| | CCATCCGCAGGCGGCATTGCCTACATTGACGTACAGTTTCCGCGACTA |
| | TGTGCTGACCTTAAAATCCTACGAGAAAACGCCGCAGTTTGAACGGG |
| | CACGTGACTACTGGCGCGCCCGCATCGAAACTCTGCCGCCGGGGCCA |
| | CGATTGCCGCTGCGTACCGACCCCACGAAGCTGGAAAACCCCACATT |
| | CGTGCGCCGTAGCTATTGTCTATCTCGTGCTATCTGGCAGCGCTTGAA |
| | AACGCAGGCGGGTCAGATGAGTATCACGCCTACTACACTGCTGCTCA |
| | CGGGGTTTGCTCAGGTGTTGGCGCGCTTTAGTTCCTCGCCGCACTTTA |
| | GCCTTAACCTGACGCTGTTTAATCGTCTGCCGTTGCACGCAGATATCA |
| | ATCACTTAATTGGCGATTTTACTGCACTGACGTTGCTGGAGATTGATA |
| | TGTCGCAGGGAGAAACCTTGCAGGCGCGGGCAAACGTGATCCACTCT |
| | CAACTGTGGCGCGATTTGGATAACCGCTTGTTTGGCGGTATCCAGGTC |
| | TCTCGACTGCTGGTACAAACTCACCGCGATCCGGCGAAATCGGTGAT |
| | TCCTATCGTGTTCACCAGCTTGCTCAATCAATATGAGGCGAGCTGGGA |
| | AACGGATGATACGCTGTTCAACCAACCGCAGGATGATCTGTACAGTA |
| | TTTCACAGACACCGCAGGTGTGGCTCGATCATCAGGTAATGGAGCGT |
| | AACGGGGAATTGCACTTTAATTGGGACGTGGTGGAACAATTGTTTGA |
| | ACCGGCGCTAATGGATCAGATGTTCCAGTGTTATTGCCAACTCCTGCA |
| | CGCCCTAGCCCAGCGACCACAGCTCTGGCATGAGACTCAAGATGTGC |
| | TGGCGCTGCCCACCGTTAGTGCACCGGTCACGCAGGCTCCTGCACCT |
| | ACGGCCTTGTTGCACCATGGGTTACTGCGTCAGGCAGCACTGACGCC |
| | ACAGGAAACTGCGCTGATCAGTCCTATCCGTGAATTGACCTATCGCC |
| | AACTGTCGACGGCGGCGGATCATGTGGCCCGCGCCCTGTTAGCGCTG |
| | GGCGTGCAGCATGGCGACCGCGTGGCGGTGGTGATGGAAAAAGGCT |
| | GGCAGCAGATTGCCGCCGTACACGGCATTTTACGACTGGGTGCGGTC |
| | TATCTGCCAGTGGATCCGGTGCTACCGCCACAGCGTCGCCAGCTTTTG |
| | CTGACGGTGGGCGAGGTGCGGGTACAAGTAACGCAGCCGGGTCTCAC |
| | GCAATTGGAGCCGTCGCTGCCCGTGCTGATCATCGACGACGGAATGC |
| | TGGACACGCCTGCTGCGCCGTTGCCTGAAGTGGCTGGGGATGTCACG |
| | GATCTGGCCTATATCATTTTCACTTCCGGCTCCACCGGTACCCCGAAA |
| | GGAGTGATGATCGACCACCGTGCGGCCATGAACACACTGGAAGACAT |
| | CAACGAACGCTTTGGCCTCAATGCGCAGGATAGGGTGTTCGGGCTGT |
| | CATCATTGAGCTTTGACCTGTCGGTTTACGATGCCTTTGCGCCTTTTAT |
| | GGTGGGTGCAGCGCTGGTACTGCCGGAAGCAGGACGGGAAAAAGAT |
| | CCGCGTCATTGGCAGACAGTTATGGCACACGGTCATGTAAGCGTCTG |
| | GAATGCAGTGCCCGCACTGATGCAGATGCTGTGCGAATACCACAGCG |
| | GCGATCGGATGAGTTATCCGACGTTGCGTCTGGCACTGTTGAGCGGC |
| | GACTGGATCCCGCTAACGTTACCGGAGCAGATGCGCGAGCGGCTCAA |
| | TGAAACGATGGACATCATCAGTCTGGGTGGAGCGACCGAGTGCGCCA |
| | TCTGGTCGGTCTACTACCCGATAGGTGAGGTGGAATCGACGTGGACC |
| | AGTATTCCCTACGGTCGGGGCCTGCGCAACCAGCCAGTATACGTGCT |
| | AAATGCGCAACTGGAGGAATGTCCGGTCGGGGTGGAAGGAGAGATT |
| | TGCATTGGCGGGATGGGGCTGGCACAAGGCTACCTGAACGACGCAGA |
| | GAAAACGGCGGCGAGCTTTGTCTGGCGCGAAGCGAGTGGTGAGCGA |
| | ATTTACCGCACTGGGGATCGCGGGCGCTACTTTGCTGACGGGCAAGT |
| | CGCCTTTTTGGGGCGCAACGATACCCAAGTGAAGGTGAATGGTTACC |
| | GTATCGAACTGGGGGAAATCGAGCGCTGCATTGCGCGACATCCCGAT |
| | GTGGAGCAGTCAGTGGTGGTGGCAGTGGGTAATTCTCAACATCGTCG |
| | GCTGGTCGCTTTTGCCAAACTGCACGATCGCCACCAGGCGCAGGCAT |
| | TGCAAGCTAAGGAAGCGGAGGCGGCGGCACTGGCGCAGGGTATTATT |
| | GTGAATCCGGCACAGCGTCTAGCGTTCAAACTCAAGGAGCCACATAT |
| | TCGCGCGCTGGATGGTCTGGGCATTGCACTGACGGCACCGGCGGATA |
| | GCACACGTTACATCAAACGCCGCAGCTATCGTCATTTCAGCGCGCAA |
| | AAAACCACGCTGGCACAGTTGGGGCAATTGCTGTCGGGCTTGGGGCA |
| | GATGCGTCTACCCGGTCTACCTTTTGCCAAGTATGCCTATGCGTCCGC |
| | CGGGGGGCTATACCCGGTGCAAACCTACGTGTACCTGCATCCAGACA |
| | AGATCGAAGAGGGAGTATCCGGTATTTACTACTTCGACCCGCGACAG |
| | AGCTGTCTTATGCCGGTAGCACCAGAAGTCGAGCTGAACAGTGGTTT |
| | TCATGCCGGACCTAATCAGTCTATTGCCGATCGGGCGGCATTCACGCT |
| | GTTTATGGTGGCTGATATGGCGGTGATCTCGCCATTCTATGGGCAAGA |
| | GGCAGCTTGGCACTTCTCGGTGATGGAAGCAGGTACTCTCTGCCATTT |
| | ACTGGAAGAAGATGCGCCGCGCTACGGATTGGGGCTGTGCCAACTTG |
| | GGATGGCAGACTTTTCCGCTGTGGCATCGCATTTTCAATTGTCGCCAC |
| | ATCATCGCTATGTCCATTGCACCGTGGGGGGCGCGATAGGGCAAGAG |
| | GCGGCAAGTGCTGCAGCATTGCTGCGCGATTTCTCCACCTATGAGAA |
| | ACCGAAGGAAACCGCTGCGCCGCTGGACATGCAGAGCTACAAAGAT |
| | GCCATGCTGCGCGGCCTGCGTCAGCAACTGCCTGACTATATGGTGCC |
| | GAGTGATCTGATGTTAGCGACCGATTTTCCGTTAACCGCTAACGGCA |
| | AGCTAGATCGGCAAAAATTACAGCTGCAGGGCGAACAAATTGCCCAC |
| | CAGCGTGACGGCGTGGGTCCAATCCAGGTGGACAGTGCGTTACAACA |
| | GCGGCTGGTGGCGCTCTGGCAGGAGGTACTCGGCGTGAGCCACGTGT |
| | CGGCCGAAGACGATTTCTTCTCGCTGGGGGGCAGTTCTATAGAATTG |
| | GTGCGTATTCAGCAGGCACTTGAGGCGATTATCGGGCAGGAGATTCC |
| | CATTGTCGATCTGTTCCGTCTGCCAACCATCGCGGATGTGGCGCGTTA |
| | CCTTGATGAGCAACTGCACAATCTACCCGCCGCCCACGATATCGTATT |
| | AGCGCAGGCTGAGGTTTCGCAGGTCAGCGCTGCGCGCGAGAATCTGG |
| | CGTTGCGGCGTAAACGTGCCCAACAGGGAGAAAAGGGCGATGAGTG |
| | A* |
| clbL | ATGAGTGAGCAGAGCTATCGTAGCGCAGGGACACTGTTGGCACAGTT |
| SEQ ID NO: | GGCGTCCGGAGAAACCACCTCAGTGGCGTTGGTGAATCACTATTTTTC |
| 1076 | ACGTATGGCGCAGTTTAACAAGCCGTTGAATGCGGTGGTGCAGCAGC |
| | ACTATGCGTTGGCGTTGGAGGCCGCCGCGCGCGCCGATCGTGAGCGA |
| | CTGGAGGGGCGCGCAAGGGGCGTGTTGCACGGATTACCTTGTACTGT |
| | TAAGGAGTCGTTTGACGTGCAAGGGTGGTTAACCACGTCCGGTGCCC |
| | ATTATCTGAAAGATAACCGGGCGACGCAGGATGCTCCTTCCATCGCA |
| | CGCTTACGCGCTGCCGGGGCGATCCTGATGGGAAAAACCAATGTGCC |
| | GATGATGACTGCCGATTGGCAAACCTATAACGATCTGTATGGCACCA |
| | CCCATAACCTGTGGGATAGGCAACGTTCACCCGGCGGATCGTCCGGA |
| | GGAGCGGCGGTGGCGGTGGCGGCGGATTTCACCCCCGTGGAATTTGG |
| | CAGCGATTTGTTTGGCTCACTGCGCATTCCCGCACACTACACAGGTGT |
| | CTATGCCCATCGTTGTAGCTTGGGGTTGATGTCGGTCAGAGGACATGT |
| | GCCCGGTGGTGGTCCGCAAGCGACTGATGAGCCGGATCTCTCGACGG |
| | CGGGCCCCATGGCGCGCAGCGCGGCGGATCTGCGTCTGATGATGCGC |
| | GCATTGAGCACATTCTGGGTGGAACCGCCGCGTATTCCCGATTTTAGC |
| | CGTTATCAGGCCAAAGCAAACTACCGCGTGTGCACGTGGTTTAGTGC |
| | GCCCCACCATGAGATAGATCAACAGATCGCACAGCGTTTTCAATCGT |
| | TTATCGACAAGTTACGCGCACAGCCTGGCGTGGAGGTTGATGATGCT |
| | ATGCCCGCCGATATCGATCCCGACGCACTGTTTGATATAGCAGTCAA |
| | ACTCAGTGGTCGGCTGGTAAGTACGGCGCTCAATGGACGCCAGCGTC |
| | TTACAGCCGGGCTGGCTGCGCTGGGCTTCAGGCTTGTGGGCAAGCTG |
| | GCGGATGTGCCTGAGGGGATAACGAGCTATTACCAGGGCATGCTGAA |
| | AGACAGTGGCGAACAGCGGAATACAGACAAACTCCGCCACGAATAC |
| | AGCCGGGTGATAGAAACCCTTTTCGCGCGTTATGACGTGTTGTTGACA |
| | CCTGTCAGCCCGGTGCTGGCGTTTGCGCACATGCAGCAGCCGGTGCG |
| | TAAGCGCAAGCTTATCGTCAATGGCGAACCGCAAGATTACAACGAAC |
| | ATTTGTTCTGGAACATGTTAGCAACGGTTTTTGGTTTGCCTGCCACCG |
| | TTTACCCATTGGCGAAAACGATGGATGAGCTTCCGTGCGGCATACAG |
| | ATCATTTCCGGGCATTTTCACGATGATGTGACGATTAACTTTGCTGAG |
| | TTCTGCGAAAGCATCAGTGGCGGATTCACGGTACCGGAAGGGTACTA |
| | G |
| clbM | ATGACGGTGAATAAGCTTGAGCCAGACAACGGCACGCCGAACGATG |
| SEQ ID NO: | AGCTGTTCACGGTGGCGGGTATGTTTGACGGCTCGCTGTATAAATTAC |
| 1077 | TCCTGCGCATGGCGTTGCCGATGTTTGTCGGTATGTTAACGCAGGTGA |
| | CCTATGCCATCGCCGATATTTTTTGGCTGAGCCACATTGATGTCACCA |
| | ACAGCGGCATCATTGCCGGTGTGGGGCTGGTTTTCCCCGTTGGAATG |
| | GGGTTATTTGCCATCGCCAACGGCATTCAAATCGGTATGGGATCTTTG |
| | CTGTCCCGCGCCATCGGCATGCAGCGGTTGGATCGTGCACAGCGGAT |
| | TTTGTCGGTCGGTATCATCATCGCGCTATTCTTTGCGATCGTGATCAC |
| | CGTACTTGGCTATGTTTATGCCCAGCCGCTATTGCGCTCACTGGGGGC |
| | CACGAAGAGCATCATCGGCTACGCAACGGAGTTCTATTATTATTCGCT |
| | GCTGACCGTGTTCAGCATCATGTTGATTGGCGTCATGATGGGGCTGTT |
| | TCAAGGCGCGGGTAAGATCATGGTCATCATGAAGGCCTCATTGTTGG |
| | GGGCGTTGGTAAATATTATGCTCGATCCAATCATGATCTTTGTATTCG |
| | ATTTTGGTGTGAAAGGGGTGGCATTGGCGTCGTTTCTGGCGCAACTG |
| | AGTATGGTCGCCTATTTCATCTACACATTGATGGGATTACATATCGGG |
| | TTGAGTATACGCATCGCGTTACGCCCATTCTCCTGGAAAATCTACCGA |
| | GAGTTTCTCTCCGTCGGCATGGCGCAGATGCTGATGCAACTGATCATT |
| | GCGGTCGGCATAGTGATTTATAATTTTTTTATCGTCAGGCTGGACGTA |
| | AACGCGATGGCAGCGTTTACGCTCACTGGTCGCATCGACTATTTCATC |
| | ATCACGCCGATGCTGGCTATCGCGACCGCGTTGCTGACTGTGGTGGG |
| | GCAAAACTGGGGACACGGAAATGTCACCCGCACGCTGAATGCCTATT |
| | GGGCCGCCGTCGCGCTGGCCTTCTCTATTGTGCTGGTGTTAGCCGTTA |
| | TGCATATTGTACTGGCACCCTGGATGTATCCCCTGTTTACTCGTGTTG |
| | TTGCCGTGAGTGACTATGCGGTACTGCAAACCCGTATCATGGCACTG |
| | GCACTACCCTTTGTCGCTATCAGCCTGTTAGCAAGTGAATATTATCAG |
| | GCCATTGGTAAGCCTTGGTATTCGGTGTTGTTGACGCTGATGCGTCAC |
| | GTGTTTATATCTGTCCCTGTCGTATACCTGCTGGCGATTGTGTTAGAG |
| | ATGCGTATTACCGGCGTCTATTTTGGGGCGATGAGCGGCACTTTTGTG |
| | GCTGCGTTGTTGGCGTGGCGTCTGCTGCGTCTTTCACCTCGTCTGCTG |
| | CGATGGAATCAGGAGGCGGTGCGCTCCCAACACTTGGATATGGAGGT |
| | GGCACCATGA |
| clbN | ATGATGTCGGGCAATCCGTTGTCGTGGCCACAGGAACAGTGCCACAT |
| SEQ ID NO: | CATTGATCAACTGTATCCTTACAGTGCCGTAAACATCATTGGTGGTGT |
| 1078 | GGTCACCATTGAGGGAATTGTCGATCTGCCCCGACTACACGCGGCCA |
| | TCCAGTCCGCCATTCGGCAATTTGATGCGTTGCGTATGTGGTTTGTGA |
| | TGGGAGAGGAGAGTGAAGTGGTCAGCCAAGTGCAGCCTTATCACTGG |
| | CGCGATATCCGCCATTTGACTTTTTCCCCAGATTATGACAAGGAGAAC |
| | CTACGCCCAGCGGCGATCGAAACATTTGTTGATGAGTGGTTCCGGCA |
| | GCCCTTTACCCTGCTGGCGCACGATTTGTTCGAGTTTGTCACCTTTAC |
| | GTGCGGTGAACAATACAGCGGTTATTTATTTAAAGCCCATCACGGCA |
| | TTGCTGATGGTTGGTCAATGGCGTTGTTGTCAAACCATGTCAAGCGAG |
| | CATACGAACAGCAGGACGTACCAGATGATGCGTCACCAGCCTATAGC |
| | GCATTTCTGGCGCAGCAGCAATCTTATCAGGCGTCAACGCGCTTTGCC |
| | GTTGATCGTGGCTGGTGGCGTGACTATATCGACGAATACCGCGACTG |
| | CTTTCCAGACAGTTCCCCCATCGTTACTACTGAGGGCATCAGTTGTTC |
| | CACTTGGCTTGAGCCAGCCATGATTAACCGTCTCTACAGGTTGTGTAA |
| | TCGTTATGGCTGTACGCTTAATACGCTGTTTATTGCACTCTTCGCTCTC |
| | TATCGCGCCAGAGTATGGGGGGAGGAAAAAGGCGTAATAGGCGTGC |
| | CGTTAGCCAATCGGCATACTCGCGAGGCGCGGCGTTGCTTTGGCATG |
| | TTTACTAATCAATTGCCGCTGGCCTATCGACTGGTGCGCACGGAACG |
| | ATTCTGTGAACGGGTGGCCTTTTTCCAGCGCGAACTGAAACGCGGTTT |
| | TAAACACAGCAAATATCCCATTACCTTATTCAACCAGGATTTGGCGG |
| | AACAGGGGGGAGGGAAGTTGCGGGCGTTCGATTATTGCGTTAATTAT |
| | TATAACTTTACCTATGAACGCCACATTGCAGGTGCCGCGCAACGCGT |
| | GGAGAGTTACTACAGCGGCGAGCAGTCCTATAAGCTACAGATTGTTT |
| | TGCAAACTGTTAATAATCATAAAGAAAGCCTTAGGTTGAGTCTGGAG |
| | GCGCTGCGTAGCGCTTTCACTCCGCACCAACTGACAGCGATGAAAAA |
| | TGGGCTGTTGGATTTAGTCACTGCATTGGATCGGCAACCTGACGCTCG |
| | TCTAGGCGATCTCGAAGTCTATCCTGCGCCGCACGTCGCATTGGCATG |
| | TGGCTCACTCAAACCCTCATTTACTTCCCGATTTGCAGCGCAAGTTGT |
| | GGAGCATGGTGATCGCACAGCACTAATTGATAATGAACAGTCTTTGA |
| | CTTATCGGCAGTTGGATGACGCTGTTGAGCGGGTTGCGCGTTATCTGC |
| | GCCAACAGGGGATCGGACGCGGTCAAGTGGTTGGGATTATCGCTGAG |
| | CATAGCGCTCAAACGGTGATGGTTATTTATGGTATTTTGCGCTGCGGC |
| | GCGGCATTTCTGCCGCTAAATCCCGCGTTGCCAACGACCCGCCTTTAC |
| | GCCATGTGTCGTAAAGCGCAGGTAGCGCATATCCTTTACGATCCGGC |
| | GATGCATGAATTGACGCAGGCGCTGGCGTTTCCCGCGTCCAGCTTGCT |
| | CCAGGCCTTAGCCACTTCGGCGCTTGCTAGAGAACCTTGGCCAGCTAT |
| | TGAACCGCAGGATCTGGCATATGTGCTGTTTACCTCCGGATCGACCG |
| | GCGAGCCTAAGGGCGTGCAAGTCTCTCATGGCAATCTGGCTAACTAT |
| | CTCCATTTCGCCGCCGAACGTTACTTTACAGCGCAGGACCGGGCTGC |
| | GCTCTACTCTTCGCTGTCCTTCGATTTGACCATCACTACGCTGTTCGCC |
| | CCCTTATGTGTGGGCGCTAGCATCAGCGTTTGTCGGCACGCCGAGAG |
| | CGAAACATTGCTGCGCATGGCCGTGGTTGATCAGCCCAACACAGTGA |
| | TCAAACTGACGCCTGCACACCTGCGGTTGTTGTGTGCGGCTGGCATA |
| | AGCAGTGAGCAGATTCGTACCTTGGTGGTTGGCGGGGAGGATTTCAA |
| | GCGGGATCTGGCGCGTAAGGCGGCTGCTCTCTTTCCTCAGGCCGTGAT |
| | CTATAACGAATATGGGCCGACAGAGGCCACCGTTGGTTGCATGATCT |
| | ATCGCTACACCGGGCAAGAAACGCTGCCTTCATTGCCCATCGGTATG |
| | GCGATCGACGGTTGCCAGGTAGCAATTTGCTCCCCTTGGGGCTGTCCG |
| | GTACCGGAAGGCGAAACTGGTGAATTGGTGATTTATGGCGCGTCAGT |
| | GACGCAGGGCTATATCGATGCGCCGCAACAAACGGCCGCCGCCTACC |
| | TTAAAGATACCAATGGGGTGATGATTGGCTATCGCAGCGGTGATATT |
| | GGCTACGCCATCGCTCCTAATACGCTGGTTTATCAGGGACGTAAAGA |
| | CGATCAGGTCAAAATTAATGGCTATCGTATTGAGCTGTGCGAAATCG |
| | AACAAGCGTTGTTGAGCGCACCTCAGGTAGAAAGTGCGGCGGTGGCG |
| | GTGATTGATGATGTGCAGGGGCAGCACAGCGGGTTGCTAGCCTGCGT |
| | GACACCGTCATCTGTTGATGTAGCTACCGTAATGCAACATCTGCGTCA |
| | GCAATTACCCACCTACATGCAACCCAAGCAGTGCTGTGCTATCGCCC |
| | AACTGCCGCTATCGCACAATGGCAAGGTGGACGTGCGTCAGATGGTC |
| | GCAACGGTCCGAAACACCGCGCCTGCATCGGGTAGCGAGCGGCTGGG |
| | AGATGCGGCGATAAGGCATTCAGTTCGGGTATGTGTGGAAGGGGCGC |
| | TGGAGCAAACTGAGTTTGATGATAACGAAAATCTTTATGTCTTGGGG |
| | TTGGACTCCATCAAGAGTATCCAGATTGCAGCGCAGCTCAGGCACCA |
| | CGGCTGGACGATGTCAGCGGTGCAGGTGATGGAGTGTGGAACAGTGA |
| | ACGCCATCTGTGAGTTTCTCGCTAGTCATACAACGGTGTCACAGCTCG |
| | CGCAGTATGCTCATAACACCCGTATCGATCTACCCGCATTGCGTTGGT |
| | TTACGCAGTTGGCGTTGCCAGTGCCCAATGTTTATAACCATGTCATTG |
| | TGCTGAAAGTGTTGCCGGGCTGCCCGCTCGAGCAGTTACACAACAGG |
| | CTGCATACATTAATCCAGCAGCAGCCAGCTTTGCACAGTGCGCTGGA |
| | CGCTGAGGGGCGGTTGCTAGTATGCGACCCTAATGTGTGTTATCCCA |
| | ACGAGGTGCTCACGGAATATTCGACGGCGCAGTGGACGTTGGCAGAG |
| | GTGATCGCTCAGTGCAATAGCATGCTTGACGTGACAAATGGTCGAGT |
| | CTTTACGGCAGCTCTGTTACACGCCCCGCAGCCTGCGTCTAGCACGCT |
| | GGTACTCTGTGCCCATCACTTGTGCGTCGATATGCACTCTTGGTATTT |
| | AATCCTCAGCACGCTGGACGCCGTCAGCACTGTCAATGGCACCAGCA |
| | ACAGCGGACTGCATCGCTGGAATGACTATCTGGCGAGCAAAACGGTA |
| | GATTCCGCCACACACGAAAGCTGGCGCACAGTATGTCAAACGCTACC |
| | GCTGCATTTCCCACCCGTGTCATTGCCAGATGACTCATTACCTCGTAC |
| | GCGCGCTTGGCGTGAAGACTTTCGCCATCCTTGCGTCAGGAGGTTGTT |
| | TGAATCCAGTGGTAATACCGCGTACAGCGCCGAAACCTATGTGCTAA |
| | CGGCATTGGCGCTGGTGCTGCGTTACTACAGCGAAGAGCCTTGGTGT |
| | CGCATCGAGATGGAAGGCATGGGACGCGGCTGCTGGCCCGATGAGCC |
| | TGACGTTGCGGATACGGTCGGGTGGTTTACTCTATTTTATCCTTGGGC |
| | GATCCCTCTGCATGGCGATATGGCGACACTGTTATCTGCGATCGCTTC |
| | CGATTTGGCAAAACGCACGCATGGTGGGGGAGATTACGGTCTGCTGC |
| | AAATGCGGCATGCACCGGAAGACTCTCTTGCGCAAGGGATCCGAATG |
| | AATTACATCGGTGTGCAGGCGCAACCTTCACTCCGCTATTTTCATATT |
| | GATCACTTTAATAGTGATATCTATACCGCGCCTGAAAACGCGCTCGG |
| | CTGCGTGCTGGAGTTTAATATTGCGCGCTCGGCAGCTGATGGTCTCTC |
| | CTTCCACTGCCGTTTCGATCCCACGCGCATTGCGCTGAATGATGTGCA |
| | ACTCCTGCTGGCGCGCTACAAGAACAGCCTCACTGATCTGGATGCCT |
| | GGCTGTGCCAACACAGCGCCACGCTGACGGGCGCGCCGACTTTGTGG |
| | ACACTATAA |
| clbO | ATGGCAAAGGATGATTTTACCTGTGGCTCACTGGATATTGCCATTATT |
| SEQ ID NO: | GGCATGAGCGGGCGTTTTTCCGGTGCGGAATCGGTGCCCGAGTGGTG |
| 1079 | GGATAAGTTGCTGGCGGGTGAGGAGTTCACTCAACCGACATGCACAG |
| | AAGACGATAATGGGAACCCTTGGATTAGGCTGCGCAATATAATCACC |
| | GCTCCCTATGACTTCGATGCTGCATTTTTCAATATTCCGCCTGGCGAA |
| | GCCCTGTTGATGGATCCGCAACAACGAATATTTCTTGAATGCTGCTAC |
| | AACGCTCTTGAGCATGCGGGCTATATTCCCACGCAACTTAAGCGAGT |
| | CGGCGTCTATGGGGCGACCTACGCCAATAACTATTTTATCGATCGCGT |
| | CTATCCATACCTGAAGATGAGCGGCGATCACCATTATCTTCAGGCGC |
| | AGATTGGTAACGAAAAGGATTACTTGTGTGCTCAGGTTGCCTACAAG |
| | TTGGGGTTTACCGGACCCGCTGTGAGTGTACAGACCGCCTGTTCCAGT |
| | TCGTTGGTGGCAGCATATTTAGCATGCGAGGGGTTATTGACTTTTCAA |
| | GCCGATGTTGCGTTGGCAGGTGGGGTCACCTTGGGTTTTTTACAGGCG |
| | CACGGCTACAGTCCGCAAGGTGATAAGCTGGTATCGCAAGACGGACA |
| | CTGCGCCCCGTTTAGCGCTGAGGCGACCGGCACGGTATACAGCAGCG |
| | GTGCGGGAGTTGTGGTGCTAAAACGTCTTGAGGATGCACTACGCGAC |
| | CAAGACAGAGTGTATGCGGTGATTAAAGGAGGTGCGGTAAATAACG |
| | ACGGCGGGCGTCGGCTGGGGTTTGTCGCCCCCAGCGTAGAAGGACAG |
| | GTAGAAGCGATCAATACGGCGCTTGCCGCCGCAGAAGTCGTACCGAC |
| | TGATATCGCACTGATCGAAACGCACGGTACCGGTACCCCGTTGGGTG |
| | ATGAGATTGAGCTTGAAGCTCTGCACCGGGTTTTCGCACCGGCATGT |
| | GCGCCGCACAGCATTCAATTGGGTGCGGTAAAAGCCAACTTGGGTCA |
| | CCTGGGAGTCGCTTCCGGTATCGTCAGCTTAATGAAAACCGCACTGA |
| | CGCTATATACTGGTTTAGTTCCCCCGCAGATCAACCTAGTAAATAAAC |
| | ATAAAAAACTGTTGCAGCCAGCCTCGCCATTTTATCTCAGTGATGTAG |
| | TGACTTCTGTCCCACAAACGAAAAGGATCCATGCCACCGTTAGTTCGT |
| | TTGGGCTGGGAGGGACCAATGCTCATTTGGTTCTGCAAAACTGGTGC |
| | GAGACGCCTGCGCAAGCGGTGCAAGAAAATGAGCGCCGCCTGTTTTT |
| | CTTCAGCGCCAAAACGCCATTAGCCCTTAGACAACAGTTGGATGCTC |
| | ATTATCACGCTCTGGCGACCTATGCGGAAGCAGATAAAGATCGTATC |
| | GCCTATACTCTCGCGCAACGCCGGGCACATTTCCCGTATCGCTGTGCG |
| | CTGGCGGCAGACAGTGTGGTAGCGTTGCGTGCAAGTTTGGCGAAACT |
| | GCGGGATGCTGACATGTCTTTTACCCCTATCAATATGGAAACTACCTT |
| | GGTGTTCCTATATCCGGACCGGGACGATAAGCTGGAGAGTGCCCTGA |
| | CGCATTTGCTGGCTTGTCAACCTAACTTGCGCCAGCGGCACCAGCGCC |
| | TGTCTCAGGATGTTGCACAAATCTGCGAACCAGCCGATTGGACGCCA |
| | GCATTGCGTCAGTTTATCCAGCAGGTGAGTCTTAGTGAATGGCTGATC |
| | GAACAAAGTATCTCGCCTGTGCAGCACATCGGTTACCTGACGGGGGC |
| | TGCAGCAGCGCAGTATGTTGCGCGCATCATCTCACTGGAAAACGCTG |
| | TTCAGCAGGTGATTGTGGCTGAAACGACACCGGAGCAGACGCTGGCC |
| | GGCAACAGTGAACTGAGCGAAATATTGGCTAATCTGGCGGTGACGGA |
| | GGGAACGCTGATGCTGGAAATCGGTCGCGCGGGGACGTTTTCCATAT |
| | TGTATCACCAGCATGCGCAGTGGGTTGGGCAAACAGTATTTTCCCCC |
| | ATGCTGAATACGGATACGCCTGAGGACATCCTGCCGCTGTTGGGCAC |
| | TCTTTGGCAACGAGGAGTGACTATTTGTTTACCGGAAATGCCAGCCGT |
| | GCAGACTATAGGCTTACCCGGTTATTCGTTTGATCGCGTCCGGTATGA |
| | AATTCAGTCCAGTGATGCGAGAGAGAACGCTATGTTACCAGTGAGTT |
| | ATTTGTCGGTCAGCGACTTTGTGGAGAAAACCTGGCGTTCATTGTTAT |
| | GCATCGATCATTATGACGAACACGCGGTTATTTTCGAATACGGAGCG |
| | ACCTCGATGCACGTTATCTCTTTCGTCGACAGCTGTAACCACATTTAT |
| | AAAATCGGACTGACTGCCGCCGATATTTATGCCAGACCCGCTATCCG |
| | TGAGCACAGTGAATTTATCTCCGAATGTGTTGATGGTATTTTATGA |
| clbP | ATGACAATAATGGAACACGTTAGCATTAAAACATTATATCATCTCCT |
| SEQ ID NO: | GTGCTGTATGCTGCTCTTTATTTCCGCTATGTGCGCTTTGGCGCAAGA |
| 1080 | ACATGAGCCTATCGGGGCGCAAGATGAGCGCCTGTCGACATTAATTC |
| | ACCAACGGATGCAGGAGGCCAAGGTCCCAGCCCTTTCCGTAAGTGTG |
| | ACCATTAAGGGGGTACGTCAGCGATTTGTCTACGGTGTTGCCGATGT |
| | GGCTAGTCAGAAAGCGAATACTCTAGACACAGTTTACGAGCTGGGAT |
| | CGATGAGTAAGGCGTTTACCGGACTTGTGGTGCAAATACTGATTCAG |
| | GAAGGCAGACTCCGGCAAGGGGATGATATCATTACCTATCTGCCGGA |
| | AATGCGCTTGAATTATCAGGGAAAACCTGCTTCCCTGACCGTGGCTG |
| | ATTTCCTTTATCATACATCAGGATTGCCTTTTTCAACACTGGCTCGGCT |
| | GGAAAACCCTATGCCTGGGAGCGCTGTGGCACAGCAACTGCGCAACG |
| | AGAATCTGCTGTTTGCGCCGGGTGCGAAGTTTAGCTATGCCTCCGCCA |
| | ATTATGATGTGTTGGGCGCGGTGATTGAAAATGTGACGGGAAAAACC |
| | TTTACAGAGGTCATTGCGGAACGACTCACGCAGCCGCTGGGCATGTC |
| | GGCGACTGTGGCAGTTAAGGGGGATGAGATTATTGTCAACAAGGCAA |
| | GCGGCTATAAACTGGGATTCGGCAAACCCGTTCTGTTTCATGCGCCTC |
| | TGGCCCGGAACCATGTTCCTGCCGCCTATATCCATAGCACTCTGCCTG |
| | ATATGGAAATATGGATAGACGCCTGGTTGCACAGAAAGGCTTTGCCG |
| | GCAACGCTGCGTGAGGCGATGAGTAACAGTTGGCGTGGTAATAGTGA |
| | TGTTCCGCTTGCCGCAGACAATCGTATCCTCTATGCCAGCGGTTGGTT |
| | TATCGACCAGAATCAAGGCCCTTACATCAGTCACGGTGGGCAGAATC |
| | CAAACTTTTCTTCTTGCATTGCGTTGCGACCGGATCAGCAGATTGGCA |
| | TTGTTGCGCTGGCAAATATGAATTCGAATCTGATACTACAGCTTTGCG |
| | CGGATATCGATAATTATCTGCGCATTGGCAAATATGCTGACGGCGCT |
| | GGTGATGCAATTACAGCCACCGATACCCTTTTCGTCTACCTCACGTTG |
| | TTGCTGTGTTTTTGGGGGGCGGTGGTTGTAGTGCGCGGTGCTTTCCGT |
| | GTTTATCGCGCAACGGCGCATGGCCCTGGAAAACAGCAGAGGTTACG |
| | TTTACGCGTACGTGACTATATCATCGCCTTGGCGGTTCCTGGGCTCGT |
| | GGCCGCCATGCTCTATGTCGCACCGGGTATACTATCTCCAGGACTTGA |
| | CTGGCGTTTTATCTTGGTATGGGGTCCATCGAGCGTGTTGGCGATACC |
| | GTTCGGAATTATCCTGTTAGCTTTCGTTCTGACATTAAATCATCAAAT |
| | TAAACGAATTCTATTACACAACAAGGAGTGGGACGATGAGTAA |
| clbQ | ATGAGTAATATCAGTTTGTATTGTTTGCCATATTCAGGTGGTTCTGCC |
| SEQ ID NO: | GCCATGTATTATAAATGGCGTAGCGTGCTGTCGGACAATATTACTTTG |
| 1081 | CGGCCTTTAGAACCTGCGGGGAGGGGAACTAGAATACGCCAGCCGCT |
| | GTGTCTTACGATGGTGGATGCCGTCGCTGACCTTTATCAACAATTTGT |
| | GAAACACTACACAGGTGGAGACTACGCCATTTTTGGGCATAGTCTCG |
| | GAGGGATCATGGCCTTCGAACTGGTGCATTATATTCTCGATCATGGAC |
| | ATGACATGCCATGCGCGCTGTTTTTTTCCGGCTGTCGCCCACCCGATC |
| | GGGCCTCTCATGAAGTAATACTGCATACCTTGCCCGATCAGGCGTTTA |
| | TGGAAGAGATCGTCAAGCTGGGCGGAACTCCGGTTGATGTCTTTCGT |
| | AATAAAGAGTTAATGACAATTTTCACCCCCATCATTAAAAACGATTA |
| | TCGGCTCTATGAGCAGTATGTATTTCAGGCCAAGGCGCGCACATTAA |
| | CCTGTCCGATCGTGCTATTTCATGGCGATGCTGACAATCTGGTAATGC |
| | AGGATGAATTACTTGCATGGGAAAAATTCACCACACGAAAGACGCGG |
| | ACTATTATATTTCCTGCTGCCGATCATTTTTTTGTCGATAAGCATTTTG |
| | AACAGGTGGTAGGTTATGTGAACCAGACGATTGAATCACTCGAAATA |
| | GTAGGGTAG |
| clbR | ATGGATAAGTTCAAAGAAAAAAACCCGTTATCTCTGCGTGAAAGACA |
| SEQ ID NO: | AGTATTGCGCATGCTGGCACAAGGTGATGAGTACTCTCAAATATCAC |
| 1082 | ATAATCTTAACATATCAATAAACACAGTAAAGTTTCATGTGAAAAAC |
| | ATCAAACATAAAATACAAGCTCGGAATACGAATCACGCTATACACAT |
| | TGCTAACAGGAATGAGATTATCTAA |
| clbS | ATGGCTGTTCCATCATCAAAAGAAGAGTTAATTAAAGCTATTAATAG |
| SEQ ID NO: | TAATTTTTCTTTATTAAATAAGAAGCTAGAATCTATTACGCCCCAACT |
| 1083 | CGCCTTTGAACCTCTATTGGAAGGGCACGCGAAGGGGACTACGATTA |
| | GCGTAGCGAATCTGGTTTCCTATCTGATTGGCTGGGGAGAGCTGGTGT |
| | TACACTGGCATGACCAAGAGGCAAAAGGAAAAACTATTATTTTTCCT |
| | GAGGAAGGATTTAAATGGAATGAATTGGGGCGTTTAGCACAGAAATT |
| | CTACCGTGACTATGAGGATATTACAGAGTACGAAGTTTTATTGGCAC |
| | GGTTAAAGGAAAATAAGCAGCAACTCGTGGCTTTGATTGAACGATTC |
| | AGTAACGACGAGCTTTACGGTAAACCTTGGTATAATAAATGGACCCG |
| | AGGTCGTATGATTCAATTTAATACCGCCTCGCCTTATAAAAATGCTTC |
| | GGGGAGGTTAAATAAACTGCAGAAATGTCTTGCAGAATAG |

TABLE 13
Colibactin Amino Acid Sequences

| Description | |
|---|---|
| SEQ ID | |
| NO: | Amino Acid Sequence |
| clbA | MRIDILIGHTSFFHQTSRDNFLHYLNEEEIKRYDQFHFVSDKELYILSRILL |
| SEQ ID | KTALKRYQPDVSLQSWQFSTCKYGKPFIVFPQLAKKIFFNLSHTIDTVAVAI |
| NO: 1084 | SSHCELGVDIEQIRDLDNSYLNISQHFFTPQEATNIVSLPRYEGQLLFWKMW |
| | TLKEAYIKYRGKGLSLGLDCIEFHLTNKKLTSKYRGSPVYFSQWKICNSFLA |
| | LASPLITPKITIELFPMQSQLYHHDYQLIHSSNGON* |
| clbB | MDNTSGDFPCNKMDTRKQLPLTPSQQGFLFHSLKDKKRSNYHEHFTCIFSQH |
| SEQ ID | VDSAHFKWALETLFRKHECFRTDYNWEIDERPCQVVKTDVLPDIYVLDCEQE |
| NO: 1085 | EIRFLLANDDIIIPVPQDDGIDAIIPQLLQADLKYPFSLKTIPVRAYLIQST |
| | KESAFILSYHHIVMDGWSLSLFIKQLLQLYGAAVVSGVRDDSAIIPSSLKPL |
| | VDTLSARRHTFQHDYWAAYLREGTPTCIVPLSQYHTDTEAENNSYVNQTNHV |
| | EINLSPDVCQKIQTLCSDYRITPAVIFYVAWGILLQRWCYADDVLFGATISG |
| | RNIPIDGIEETLGLFINTLPLRLRDDGATLLQHLQRMHQTLIAHYSNEHDAL |
| | ASIQRLVHKEGHAGDLFNTLVVLENYPVDMTLLSCASPVAIRHLSVHEQTHY |
| | PLTLTITQQKGFRFSIAYALNYLTNNMAQALLMHLSYLLEQLVDNPQRPIAA |
| | LVNLSPCQQAQVLQPYLERMACRDWDSQSNVIEQFHQVAATSPAQVAVVDEL |
| | CALTYSELAAQAEQLAAYLVQQGVMVGDTVGIISERRVNTVVAIIAIMLIGA |
| | AYVPISPDYPVGRMQEIIDDSGLALLLVHGKPLDALNVAQSDLCAFPVAPSV |
| | VFPVITPDSRAYVIYSSGSTGKPKGIAVAHRGLLRLIQGDSPLKVESGETTL |
| | LTCPFEFDVSVFEMWSTLLNHGKLVLLSKQALLDINHIRRTIADEQVARAWF |
| | TSSLFNSYVAEGADFFGMLQHITVGGEAVSAWHVNDVMQKYPHLVVTNGYGP |
| | TENTIFTTAYRENGLQPARVPIGYAVPGTSLYITDLHGHLLPIGATGELVAG |
| | GVGVAIGYQNNPALSATVFVPDPFIPGGMMYKTGDYARLLDDGCVDCFGRKD |
| | GQIKINGQRIETGEIEQRLLECSGIIEAVVVPYRVRETLHIAAVVCVNDSYD |
| | EVEVRGQLADRLPPFAIPESLVVVTEIAKSHSGKADLAQLRYLLPATQCNAV |
| | STTISEVHSDMEHALHAIWQRVLDRQDIDSNASFFALGGTSLDTIRVKGDIK |
| | RQLGLEIDITDLFKYPTLTALAHFLDTAVSPEDAIPTRAVVYSDMPVAIVGM |
| | AGRFPGAANIAALWTLVVGGESGLTLFSDEELRAHGVTPDTLKQANYIKTKG |
| | IVDDHEWFDADFFGYTPNEAECMDPQIRLLHQCCWQTLEHAGCDPATFTGAI |
| | GIYAGLLTSPHWLNAVMQDTTDSTALYKASILNIHSVTALIAHALNLTGPAV |
| | TLDTACSTSAVAIHQACIALRNRDCDAALAGGVSIEMPAYRGYEYHEGMINA |
| | RDGVCRPFDSQASGTVTGDGLGMLLLKRLDDALADRDCIYGVIKGSAVNNDG |
| | NNKIGYTAPSVIGQSTVIRTSLRRAGFDSDSIGLVEAHGTGTVLGDPIELRA |
| | LNEVFGPTPVPFCVVSALKSNIGHLNSAAGVAGVIKTTLALHHQVLPPTAHF |
| | RQLNPAIDLSRSALYVNQQVQPWPSTRPRRALVSSFGIGGTNASIALEAHQH |
| | EDDPSATGVRDSYLLLFSAKTPAALELRVASTLEYVKHGVGVRLPDVAYTLQ |
| | TGRTAFDHRRAYLVSRGSKIDLSCATILQAEIFNGQRTTAEICFMFPGQGSQ |
| | YHGMASALYAHQPMFRQHMDRCFAAFQRYSTVDLKALLFDDEDTRDIDQTQF |
| | TQPALFCVEYSLARTLIDLGITPDSMIGHSLGEYVAACIAGVFTLEDALHVI |
| | EARGRLMQSMRPGSMMAVYLSREQLTPWLAAERGIELAANNSAHFCVVAGEQ |
| | AAISRLSTRLVEGGIQHRRLKTSHAFHSAMMTPMLHDFAQLLGQIPMHAPHK |
| | RFISNVSGTWITEEQATSPDYWVQQVRNAVLFSEGAAQLLVQPTLFIECGPG |
| | NTLSTFIQGHNQYSDQPTLLTLRKANAAIDDEHMLHRTLAALWVRGENIDWR |
| | RFNQTALGKHIPLPDYPFEQTYYYRYGAALSGYRQYPNPLRRPQDEWLQRVL |
| | WRMHDTSLREAFYAPGELIIIISADGDKLQQTLMSSGVDSITMPLPISSEDD |
| | VWDNDRILTHFHDICALLAHKTYRQLHCLYAPGAEAGSSLTQSLSGLYRVAR |
| | WCMHSTTPLASLTVLTHGAFRVQEEDNPEPTLAALSGAVNVFAQELHPTEVR |
| | LIDIDAQSSDENLNLLTQRLAPKQETVMALRQGMLYLRRFIPTRLLAHLPPQ |
| | TGCIPGNVLWIIGGEKGIGRMIGEALAQREGVRVVLSSRTGYHHEAVQQDAL |
| | DVIHCDVTQAEAVRACLATLLERYGRLDGVIFAADATTTLTLHQLSESALRD |
| | TLTVKERGTANVLHALAQRNLLDERLLLLFCNSLAAVNAEIGQTGYATASAY |
| | LDALAQQLRTRYKVNALSIGLDALREQGMLLDAINGSEYDVLRGLRPLMTGT |
| | LLQAYKQQGADTSYYARLSPESDWLLDEHRISGIATLPGTGYLALAYEALRH |
| | YFVQDQICIDELVFLAPLTVMDNCSVDVFVDISPNGQGVSVEVKSMTERFSG |
| | TLTTHARGRATRLMVDDNVVCDLTGLMREMHTITPPTKELSSTHFHYGPRWH |
| | SVQQLYGNTAQTQVFATLALPTVAANDTIALHPALLDIASSVVEQLPGFHTD |
| | SVPFLYQDLRLYRPLPNTLHVALTVNRHDEEGDSYAFTLYDMAGEMVARCAA |
| | MVKRKVQLHIQDVDDDTRLRVPSADNYQLRLAAEGEGAGKLALCPTPRLALG |
| | DSQVEIEVLATGLNFKDVLFTTGLLRQQPGEAPLQLGLECAGRITRVGKNVT |
| | EFAPGEDVMAVLNGGFVQYARVESDCVVRKPAHCRIEQAAALPIAYLTAYYA |
| | LVVRANLQPGERVLIHSAAGGVGLAALHIAKRCGAQIFATAGSEQKRDYLLS |
| | LGVHAVADSHDEQFAATLLTASDGQGMDVILNSLTGRLLDASLALLAPLGRF |
| | LELGSKDIVEDKALPMRFFAQGGTFIPINFHAAHGAFSRYLQQIVAWIDDNT |
| | LPLLPCKSVPLPEVARAFATLTTPQHIGKVVVTHRTAAGMDRLNAMIAERRL |
| | GGYALSMSNAEVMRQLWPILNTRSPWAQLLLSPRAIDRLARGNRVDRGVPSA |
| | ANDTITQQTVKKRPRPEIGVPYSPATREVERVLCQILEEYLGLDRVGIDDNY |
| | AELGATSLDMVQLSGQMARHYPQVSVVSLYNHATVRQLATFCQPPEGESNAP |
| | SPQPAVQTNTRANQIAKRALQIAKNTARSHTSLH* |
| clbC | MEYASEMNGMEIAIIGMAVRFPQSRTLHEFWHNIVQGKECVTFFSEEELLAE |
| SEQ ID | GVEQSTLDNPAYVRAKPYIEGICDFDAAFFGYSHKEAQTLDPKSRVLHEVAY |
| NO: 1086 | HALEDAGYAQRTSDLITGVFVGASEDVDWLRRSLSQIGGDALNRFESGIYGH |
| | KDLLAHLIAYSLNLNGPVYSLYTSCSTSLSATHIACRSLLFGECDLALAGGI |
| | TIDLPQKSGYFCQQGMIHSTDGHCRPFDSQASGTLFGDGAGVVVLRRLEDAL |
| | AAGDRIYAVIRGSAVNNDGKQKIGFVAPGHEGQKAVICAACHLAEVSPESIG |
| | YVETHGTGTRIGDPIEFAALTEAFDTSHRQYCALGAVKANIGHTHAAAGVAG |
| | LIKTALVLHHRTIPPLANYQMPNSKLDLAHSPFYIPIQPQEWPASRMPPRAG |
| | VSSFGIGGTNVHMILEGLNPAVRDDHDQVRAPVFIPLSAPSFEQLDELTQQL |
| | TPLLATLDASTLAYTQQVARPVFDCRRVIQVENDGTQAMLASLDNLMPDAPW |
| | GLHCPDLRTTNDCTYAQWLAHSAHYQREATALTALLDGMNIPPAYCHAETWA |
| | AQANSSLLIRGCQTIAALKTWMNLLPTLTLLSGAGTGLLPAAAASGMIATQD |
| | VLHLLWEMEQKALHLWLPERHEPIPGYVLAWQGNPITDAQRNDRGFWSEALL |
| | ADTRELGEGVHSINWVRLPPEIREDVDVLRYVAQLWCAGINVDWAVWYGTPL |
| | PQRGSASAYPFAHNHYPLPGRVMGSVETQPEAGPETHHPYQARPVLSVPFVA |
| | AHSRGMQYITGLMELLLEISPVGVDDDFFELGGHSLLVTQLTSRLERDFNVH |
| | IDLLTLMENPNPRNIYAHIAAQLGGEDNLEIACQ* |
| clbD | MMNVAVIGAGVMGTGVAHNMAQYGISTNVVDISQSQLDKCRQMIEANLRLYN |
| SEQ ID | FHPQHKKKTHSTAEIMENIRFTTELDDIVECDLVIENITEDIEKKNALYTRM |
| NO: 1087 | NTICGASTVFGVNTSAISITALSKLMRHPENVVGVHFMNPVPLMHTVELIRG |
| | VHTAERTLNIFHHLFAQLNKTGIVVNDSPGFVTNRAMMIFVNEAIFMVQEQI |
| | ARAEDIDTLFKTCFGHKMGPLQTADLIGLDTILQSLQVLYESFNDDKYRPSF |
| | LLKKMVDAGYLGVKSGQGFYRYQQTYAEQ* |
| clbE | MKKQDMKAAIREFLSRSLRGHTLNDDDDIFSLGLVHSLFTVQIILFIEKNFQ |
| SEQ ID | VELEVSELKTEQIATVNKIVELIQRQTGLE* |
| NO: 1088 | |
| clbF | MCTENYELAQQEAVLFAKQHLALAAQNIERQQFIVPDIISCVAQAGYLGASI |
| SEQ ID | PQKYGGRGYDSYQLCALHEVMAGVHGSLENLITVTGMVSTLLQRVGSAAQKA |
| NO: 1089 | HYLPKLATGELIGAIALTEPNIGSDLVNVETELQQDGDGWRLNGKKKWITLG |
| | QIADFFIVLIHCGNQLATVLIDRNTDGFTITPLNDMLGLRGNMLAELHFNDC |
| | RLKEDALLGPLTPGVPLAVNFALNEGRFTTACGSLGLCRAAVDVAARYIRQR |
| | KQFKRRLFSHGIVQHLFATMLTQTRSAQLMCFSAAEYRETLHPAMINQILMA |
| | KYVASKAAVDVAGKAVQLLGANGCHADYAVERYYRDAKIMEIIEGTSQIHEI |
| | QIAMNYMMGSEA* |
| clbG | MTKDVALMFPGSGSQYVGMARWLYERYPQVRTLFDEASQITERDMAALCLSG |
| SEQ ID | TLVQLAEPTAMALAIYTTSVAHFVAWQQFLAQTGVHVNLRYMLGHSLGEYAA |
| NO: 1090 | LTCSGALSFSQALALVAMRSRLASEIAREMDASTTIIKQGNQALVAAACEVA |
| | ERETRQQVGIACFNSPQQFMLSGQNSAIIAAEQYLLDHDRQVEVVPLIGGVP |
| | YHSPLLKPCGQQLRKALDRCEWRRPCCPVISNVNAQPYPDTVTPVQWLEQQL |
| | SQPVQWQRSLTYLTGHLSPIAIEIGPQSVLKNLLLENRYPAPVYAFDNRHDR |
| | AQLALVLGDNMAVKTDPEAVRRQRITLLTNALTATRHHRAADVAASAQLKEL |
| | LSRFFERIQQIEQRGTSSEEDIAFLHELLEQGFQLKGSSQAEIDACHARLAS |
| | DNGGQA* |
| clbH | MEQQGIMRQLPTDDQTIVDYLYRIAGEYGEKAAVLMGDAALSYHDLNARSNQ |
| SEQ ID | LAHYLRGLGIGEDRVVAIRLPRGMAMLIAIFAIVKAGGAYLPLAYNAPRSRI |
| NO: 1091 | ENILSNSGAVCLIGTDDGDRWPIPRVEIDSAAVSAMPTTDLRYRPHARQLAY |
| | IIYTSGSTGVPKGVATEHAALLNRIVWMQNAYPISSQDVLFQKTVYTFDVSV |
| | WEMFWWAMYGASVVLLPSGLESDPRTLARLIQRHRVSVVHFVPSMLNLFVEY |
| | LEMKQDPRLTASLRLVFSSGEKLTVHSVARFYQSVAQGDLINLYGPTEAAID |
| | VSHHRCLRGYDYDDIPIGQAIDGCRLYVLDDHGNPVADGEEGELYLAGIGLA |
| | RGYLNNVALTDRCFTIHPTLRHLGKPERLYKTGDLVWRDGESQQIHYIGRND |
| | FQIKIRGLRVELGEIEAHAMRFPGVQQAVVVADQDDPDNQLIYAFVVSSVPL |
| | NLAALMDALSKNLPAYMLPNRLLAMSELPLSDNGKCCRKTLLDLARAYSASR |
| | VDLRETPAVRYLPLSSAQSSMWFMQQLAPHTALYNNPTALLLEGELDRTRMD |
| | GAIRQLMSRHTLLRAMAETHNGQPVLAVPQCVSSQALLTIVPLPSVSDDNAL |
| | QAMINQRAAHPMPLTSGTPLCRFELLTLDDDRSVLLIHLHHIISDGWSKGVL |
| | LRELQAAYNGESLTPEPLLEYADYMEYQEEWRQSDAYQDAMRYWQNTLAGTL |
| | PILDIPTDQPRQKVARYQGAFVAFALSANTCERVLAAARAQRVSLYNYLLTA |
| | FVLLLHRNARQQEYIVGMPIAARLTKEQEHMIAPLVNVLPLRLPLDEAASFS |
| | ELVQTIRGILFAAFRHQRLEFTDIVRAVNVDRSAGTPCALLPDMQAYLLFTS |
| | GSTGEPKGVCVVHRGLLNLLLDMQRTFAVGSQDRLLSVTTPTFDISFLEYLL |
| | PLISGASLYLTEAERAADSFRMIPLIADYRPTLMQATPSFWHGLLMAGWRGD |
| | PELCVLAGGEALPTKVAEELLRCCGSLWNLYGPTETTIWSLKSQITQAENIT |
| | LGAPIANTRIYILDNEGHPVPQGVDGELYIAGDGVAQGYDGQPELNAQFFLS |
| | EPGVPGGRMFRTGDLVRSDAQGQLFFVGRKDSQIKLRGYRIELGEIERTLAR |
| | HPHVDAAVVACIERAPLHKALAAFIITSEPPSLFEQLKNELRQQLPDYMVPT |
| | LWQRVADFPNTDNGKIDRKRLAENFVADSSLVSPQTQALSDTEQMLLALWMR |
| | YLPIKNVDPECDFFRLGGHSLLAVTLVAEINRTFHCALTLKDIFHYSTLRAL |
| | SARIAQQSITDAAASQDDWVIVHDPEHRHQPFPLTDVQRAYWLGRQTGATSI |
| | ATHIYHEFDVEHFNVTRFTHAVNALIARHEMLRARVLPDGTQQILAQVPAYQ |
| | LEQRDLSALSPNARNDALMAIRDRLSHHVHPADRWPLFDFSYSACTAQHGRL |
| | HFSLDLLIADALSMRTLQQELMMLYREPHVSLPLLPFSFRDYVQALLVEQAS |
| | EAYARDQAYWQRALPQLYGPPTLPVQGDLAQLSAIRFVRRRHRLSAHNWGVL |
| | SALAQRTRITKTALLLTVFHFPIYQCMFQLDNMPLASPTLNGVNVTPLLLDT |
| | SASQVDISLSMQHIDGRITGTFEYDAGLYSADRIQHLVAQWRELLDEASSQP |
| | TQLVRDLIRFTPREHAWLARHNATEVALPPVDNLLALVLPHCQQRPTQVALR |
| | HADDAMTYGELQQATMQMCTWLRAQGVKRGESVALQLPFCFELIIAQLAILS |
| | LGASYVPLDGNAPAARNALILAQATPCMLLVAQPLESPHGLTIPWVLVPDWR |
| | SLLTEIPNLPVSVAPDALDCDAVVIFTSGTTGQPKGVRLSQRNLVNLTASFI |
| | SSYQVTHQDVLLPITSVASASFVGEVLPLLAAGGTLVLAQKAQSLDSDALIA |
| | LLASQRVTILSTTPSLSASLSVLAQSMGSLRLFLCGGEALEYEQIAPLLPHM |
| | AVVNGYGLTESGICSTYFPVAKRREQETGALPIGRPIQNTQAYVVDAYNRLV |
| | PPGACGELCFSGLGISPGYLDARQDPERFVELPEYPGVRVLKTGDRARWATD |
| | GMLFYLGRQDRQVQIRGYRVELGDIESLLKQHPDIADAWVDVRRNAAATPLL |
| | VAFYCSVNGVALDAQQLRVWLSLRLPLHMLPLLYVPLSAMPLGVNGKIDPQC |
| | LPLVDLRQLEGPGEYVPPATELEQRLAEIWQQLLGLERVGTTTNFFDLGGHS |
| | LLLVQMQQYIGQQCGQHVALVDLLRFTTIKRLAEFLLAPDAAQGTTGDQTQL |
| | RAAKQRLAFGHTRWAATTDSHH* |
| clbI | MAENDFGIAIIGMAGRFPQADTVQAFWENLLASRECISFYSDEELLAMGISP |
| SEQ ID | EFVQHPDYVKAKGEVADIDKFDAAFFGIAPREAELMDPQHRVLLETAWAAFE |
| NO: 1092 | DAGYVAADYPGDVGIFAGKSMDSYLMLNLMPHFKRVFSSGSLQAAIGNDKDS |
| | ITTTIAYHLNLRGPAITVQTSSSTSLVAVCVACQSLLTWQCDMAIAGGVTLG |
| | PPAKTGYLSQEGGITAADGHCRAFSDNSSGFVPGTGAGLVVLKRVDEALRDG |
| | DNIYAVIKGFAVNNDGSEKISYTAPSVDAQARAIAQAQRLAGLTPQDITYVE |
| | AHGTGTRLGDPVEFSALSQAFAGASQKQYCALGSVKTNIGHLDTAAGVAGLI |
| | KTALAVQQGIIPATLHFERPNAQIDLTNSPFYINTTCQPWQPESGIRRAGVT |
| | SLGMGGTNAHVVLEQAPAVDLQARAPVPAYSILPFSAKTDSALSSGLARFAD |
| | FLQHESLPDRRDLAWTLSQGRKAFAHRAALVTRDLHAAGTLLQQAATAPFAR |
| | GVAQTQLGLGLLFSGQGSQYQRMGHQLYQVWPAYADAFDRCATLLEREYQLD |
| | IRHELFRAEVSLAQGERLAQTCLTQPLLFSVEYALAQLWLSWGITPTVMIGH |
| | SLGEWVAATLAGVFSLEDALRLVARRAELMHQAPSGAMLMVALPEAQIRALI |
| | TAPLAIAAVNAPDYSVIAGPTSEILAVSQRLTEQNIINKRLHTSHAFHSSMM |
| | QDAAQALRQAFENVRLNPPTLTIISTVTGAHVSADTLTTPDYWIEQMLMPVQ |
| | FSAALQEAQATFDVDFLEIGPGATLTQLTNGHALGDRLAFSSLPAGARSSDE |
| | HKHILDTVAALWVRGHNIDLSAFAGEQPRRVSLPTYAFDKIRYWVDSPEEQR |
| | SAVTPVADAGSVIPSEPSVRRQPRPAFSVPYAAPESKTQRGLVAICEALLGI |
| | DGLGIDDNFFEAGGHSLMLGMLLAQVQERFAVTLSFFDVMEDASVRALAQLV |
| | EQEQQDDGGSALAVLVNDMINE* |
| clbJ | MTIHHAALARMLPAEKKEKLLRQLAQSGVSPSRIPIIKADPAQAIPLSFNQE |
| SEQ ID | RLWFLQKYDSTATNYNLYVVYRLHGVVDMPMLTEALRHVQARHAILRTRIIV |
| NO: 1093 | RNDRPCQVIDDASSLVLDTVTLAAQAPTSALDAVIQQVINTRFDLARGPLWG |
| | VTQIIQPDQGCHLVFCAHHIIIDGISLRLLFDELQQQYARLHAGNETSLPPP |
| | PLQYADYAFWQREWFQDTLLANELAYWRARLODAPLLSTFPSLHPRPAQPST |
| | HGSRFSITLDETLSLALKHVARTQETTPFVLMLTAFQLVLMRYAQQQRLVIG |
| | MPVSGRIRPELQSSIGYYASTAVIYTDFNGVEVGREALQRVKASVKETQGRQ |
| | QLPFENLVNMLDLPRSLSHSPLFQILYIYHNHVTPRAFTLAGAYWEQVTYHN |
| | QTVKYDMTVEVFQNDATFDVSFEYDLGLYDADVVKQIAEALRQHCLSLTSSL |
| | ETPIGAIPLHAPETATPRRDPLNATNVPWLGPQDVLRIIEQRCVQHPKQLAI |
| | QQHDGTLTYAELWARVQFIAMRFRAHGIQPGDRIGVLLPRHRDVIATMLATW |
| | FVGACYVPFDIHQPAARLQRLMQRARLVCLVVRQPGEWGEIVQLSLPELMQD |
| | MSNAIRYSSQVLARWSLSPTFTLNLTLFNRPQGYPNAEAVIGDFTAVSLLNV |
| | CYDSQHSYAHNAQRIQVQLWEDLEHRRFSGIRASEALIHSGRFHAPMPVVFT |
| | SMLDIDGETTAQDPRDTTRFTLCPDANITQTPQVWLDHQVIELAGELHFNWD |
| | AVEQLFDTTLLDQMFGAYCHALQALVAMPQSWWGVNSSLALPTVSAPVTQAP |
| | APTALLHHGLLRQAALTPQETALISPIRELTYRQLSTAADHVARALLALGVQ |
| | HGDRVAVVMEKGWQQIAAVHGILRLGAVYLPVDPVLPPQRRQLLLTVGEVRV |
| | QVTQPGLTQLEPSLPVLIIDDGMLDTPAAPLPEVAGDVTDLAYIIFTSGSTG |
| | TPKGVMIDHRAAMNTLEDINERFGLNAQDRVFGLSSLSFDLSVYDAFAPFMV |
| | GAALVLPEAGREKDPRHWQTVMAHGHVSVWNAVPALMQMLCEYHSGDRMSYP |
| | TLRLALLSGDWIPLTLPEQMRERLNETMDIISLGGATECAIWSVYYPIGEVE |
| | STWTSIPYGRGLRNQPVYVLNAQLEECPVGVEGEICIGGMGLAQGYLNDAEK |
| | TAASFVWREASGERIYRTGDRGRYFADGQVAFLGRNDTQVKVNGYRIELGEV |
| | KSHLEQLDSVGSAAVVCHQGQLYAFITAAENLHPDDTDALLARVRAQLAVQL |
| | PYYLLPQHFFLLKVLPMTGNGKIDQAAMVQEVIQRMSQSTSQKSRALAHASP |
| | YEQQVAALWCEVLQREQIGLNDNFFEAGGGSIQIVLLHRRIEEIFKVTVPIA |
| | ELFRLTTVKRIAGYLQAMQDNARAVNQTQQRDASRSRAQQRLVRRHQRQR* |
| clbK | MTYSESDIAIVGMNCRYPGVHSVAAFETVLRTGCNILDPKVTPSNGHNHITL |
| SEQ ID | NNVYEHMAEFDANFFGYSRAEAEIMDPQQRVFLTCAWEMFEQSGYNPKQHDA |
| NO: 1094 | RVGLYAGVSTSFYLLTHLMNNPDKLAQLGGLQIMVGNDKDHLTSQLAYRLNI |
| | TGPCVTVQASCATSLVAVHLACEGLLSGQCDMALAGGVTFRMEEQRSYESHG |
| | DGLQAEDGLIHTFDAQASGTVYSSGLGMVLLKRATDAQVQGDNILAVIKGSA |
| | INNDGGARSGYTVPGVDGQEAVMIEAHSLAEVTPQQIQYLELHGSGTPLGDA |
| | IEFAAIKRVFGTPAPNATPWRLGAVKPNVGHVEMASGITSLIKTVLSLTNRV |
| | FYPTLNFQRANPQLGLEDSPFEVVSRLTPWPEGTTPRTAGVSAFGLGGTNAH |
| | LVVQAPLSTPQARAQQMGPCVVVLSAKNHNALEQMQNALLAKLAAHPEIRLQ |
| | DVAYTLRHGRFSAPVRKCVIAENCTQLARQLRDAPMVEATTGCTIYWRLGHR |
| | FVVALETLSDWLACSEVLSQAVGQLLEHFPLEPACLQDLSPAQRTFISQYAL |
| | IALIDERETLNVVLCGDGDGGYAAAVLRGDCTLEQAWHRLNAGQPFDDVPTN |
| | PLLQPDVCSLMLDDAASDANRTALEALGQLWLAGVSLDWRWVDAAERMLGSQ |
| | RIALPGTVFTPQRYWVEAVRPATFSHESSNNLLSRATKSDIIAVVTEIWERT |
| | LGVSIDDHHASFFELGGHSLLASTILYDIQQRYGITCTLSAFFADPTIEGLS |
| | CYLLEQGGSETAVSALPDTVFAPDQQHLPFPLTDVQQAYWVGRRKSLGLGNI |
| | STHIYVEYELQGLDETAFNRALNAVIARHSMLRAIVNDDGMQQILPNVPEYH |
| | VAFYTTQCEDAFQQRCRELRDTLSHQMIDCSRWPLFQMEVVVDPQQKARLHV |
| | SIDLLIADAWSLELFIRELAYHYRHPQAALPTLTYSFRDYVLTLKSYEKTPQ |
| | FERARDYWRARIETLPPGPRLPLRTDPTKLENPTFVRRSYCLSRAIWQRLKT |
| | QAGQMSITPTTLLLTGFAQVLARFSSSPHFSLNLTLFNRLPLHADINHLIGD |
| | FTALTLLEIDMSQGETLQARANVIHSQLWRDLDNRLEGGIQVSRLLVQTHRD |
| | PAKSVIPIVFTSLLNQYEASWETDDTLFNQPQDDLYSISQTPQVWLDHQVME |
| | RNGELHFNWDVVEQLFEPALMDQMFQCYCQLLHALAQRPQLWHETQDVLALP |
| | TVSAPVTQAPAPTALLHHGLLRQAALTPQETALISPIRELTYRQLSTAADHV |
| | ARALLALGVQHGDRVAVVMEKGWQQIAAVHGILRLGAVYLPVDPVLPPQRRQ |
| | LLLTVGEVRVQVTQPGLTQLEPSLPVLIIDDGMLDTPAAPLPEVAGDVTDLA |
| | YIIFTSGSTGTPKGVMIDHRAAMNTLEDINERFGLNAQDRVFGLSSLSFDLS |
| | VYDAFAPFMVGAALVLPEAGREKDPRHWQTVMAHGHVSVWNAVPALMQMLCE |
| | YHSGDRMSYPTLRLALLSGDWIPLTLPEQMRERLNETMDIISLGGATECAIW |
| | SVYYPIGEVESTWTSIPYGRGLRNQPVYVLNAQLEECPVGVEGEICIGGMGL |
| | AQGYLNDAEKTAASFVWREASGERIYRTGDRGRYFADGQVAFLGRNDTQVKV |
| | NGYRIELGEIERCIARHPDVEQSVVVAVGNSQHRRLVAFAKLHDRHQAQALQ |
| | AKEAEAAALAQGIIVNPAQRLAFKLKEPHIRALDGLGIALTAPADSTRYIKR |
| | RSYRHFSAQKTTLAQLGQLLSGLGQMRLPGLPFAKYAYASAGGLYPVQTYVY |
| | LHPDKIEEGVSGIYYFDPRQSCLMPVAPEVELNSGFHAGPNQSIADRAAFTL |
| | FMVADMAVISPFYGQEAAWHFSVMEAGTLCHLLEEDAPRYGLGLCQLGMADF |
| | SAVASHFQLSPHHRYVHCTVGGAIGQEAASAAALLRDFSTYEKPKETAAPLD |
| | MQSYKDAMLRGLRQQLPDYMVPSDLMLATDFPLTANGKLDRQKLQLQGEQIA |
| | HQRDGVGPIQVDSALQQRLVALWQEVLGVSHVSAEDDFFSLGGSSIELVRIQ |
| | QALEAIIGQEIPIVDLFRLPTIADVARYLDEQLHNLPAAHDIVLAQAEVSQV |
| | SAARENLALRRKRAQQGEKGDE* |
| clbL | MSEQSYRSAGTLLAQLASGETTSVALVNHYFSRMAQFNKPLNAVVQQHYALA |
| SEQ ID | LEAAARADRERLEGRARGVLHGLPCTVKESFDVQGWLTTSGAHYLKDNRATQ |
| NO: 1095 | DAPSIARLRAAGAILMGKTNVPMMTADWQTYNDLYGTTHNLWDRQRSPGGSS |
| | GGAAVAVAADFTPVEFGSDLFGSLRIPAHYTGVYAHRCSLGLMSVRGHVPGG |
| | GPQATDEPDLSTAGPMARSAADLRLMMRALSTFWVEPPRIPDFSRYQAKANY |
| | RVCTWFSAPHHEIDQQIAQRFQSFIDKLRAQPGVEVDDAMPADIDPDALFDI |
| | AVKLSGRLVSTALNGRQRLTAGLAALGFRLVGKLADVPEGITSYYQGMLKDS |
| | GEQRNTDKLRHEYSRVIETLFARYDVLLTPVSPVLAFAHMQQPVRKRKLIVN |
| | GEPQDYNEHLFWNMLATVFGLPATVYPLAKTMDELPCGIQIISGHFHDDVTI |
| | NFAEFCESISGGFTVPEGY* |
| clbM | MTVNKLEPDNGTPNDELFTVAGMFDGSLYKLLLRMALPMFVGMLTQVTYAIA |
| SEQ ID | DIFWLSHIDVTNSGIIAGVGLVFPVGMGLFAIANGIQIGMGSLLSRAIGMQR |
| NO: 1096 | LDRAQRILSVGIIIALFFAIVITVLGYVYAQPLLRSLGATKSIIGYATEFYY |
| | YSLLTVFSIMLIGVMMGLFQGAGKIMVIMKASLLGALVNIMLDPIMIFVFDF |
| | GVKGVALASFLAQLSMVAYFIYTLMGLHIGLSIRIALRPFSWKIYREFLSVG |
| | MAQMLMQLIIAVGIVIYNFFIVRLDVNAMAAFTLTGRIDYFIITPMLAIATA |
| | LLTVVGQNWGHGNVTRTLNAYWAAVALAFSIVLVLAVMHIVLAPWMYPLFTR |
| | VVAVSDYAVLQTRIMALALPFVAISLLASEYYQAIGKPWYSVLLTLMRHVFI |
| | SVPVVYLLAIVLEMRITGVYFGAMSGTFVAALLAWRLLRLSPRLLRWNQEAV |
| | RSQHLDMEVAP* |
| clbN | MMSGNPLSWPQEQCHIIDQLYPYSAVNIIGGVVTIEGIVDLPRLHAAIQSAI |
| SEQ ID | RQFDALRMWFVMGEESEVVSQVQPYHWRDIRHLTFSPDYDKENLRPAAIETF |
| NO: 1097 | VDEWFRQPFTLLAHDLFEFVTFTCGEQYSGYLFKAHHGIADGWSMALLSNHV |
| | KRAYEQQDVPDDASPAYSAFLAQQQSYQASTRFAVDRGWWRDYIDEYRDCFP |
| | DSSPIVTTEGISCSTWLEPAMINRLYRLCNRYGCTLNTLFIALFALYRARVW |
| | GEEKGVIGVPLANRHTREARRCFGMFTNQLPLAYRLVRTERFCERVAFFQRE |
| | LKRGFKHSKYPITLFNQDLAEQGGGKLRAFDYCVNYYNFTYERHIAGAAQRV |
| | ESYYSGEQSYKLQIVLQTVNNHKESLRLSLEALRSAFTPHQLTAMKNGLLDL |
| | VTALDRQPDARLGDLEVYPAPHVALACGSLKPSFTSRFAAQVVEHGDRTALI |
| | DNEQSLTYRQLDDAVERVARYLRQQGIGRGQVVGIIAEHSAQTVMVIYGILR |
| | CGAAFLPLNPALPTTRLYAMCRKAQVAHILYDPAMHELTQALAFPASSLLQA |
| | LATSALAREPWPAIEPQDLAYVLFTSGSTGEPKGVQVSHGNLANYLHFAAER |
| | YFTAQDRAALYSSLSFDLTITTLFAPLCVGASISVCRHAESETLLRMAVVDQ |
| | PNTVIKLTPAHLRLLCAAGISSEQIRTLVVGGEDFKRDLARKAAALFPQAVI |
| | YNEYGPTEATVGCMIYRYTGQETLPSLPIGMAIDGCQVAICSPWGCPVPEGE |
| | TGELVIYGASVTQGYIDAPQQTAAAYLKDTNGVMIGYRSGDIGYAIAPNTLV |
| | YQGRKDDQVKINGYRIELCEIEQALLSAPQVESAAVAVIDDVQGQHSGLLAC |
| | VTPSSVDVATVMQHLRQQLPTYMQPKQCCAIAQLPLSHNGKVDVRQMVATVR |
| | NTAPASGSERLGDAAIRHSVRVCVEGALEQTEFDDNENLYVLGLDSIKSIQI |
| | AAQLRHHGWTMSAVQVMECGTVNAICEFLASHTTVSQLAQYAHNTRIDLPAL |
| | RWFTQLALPVPNVYNHVIVLKVLPGCPLEQLHNRLHTLIQQQPALHSALDAE |
| | GRLLVCDPNVCYPNEVLTEYSTAQWTLAEVIAQCNSMLDVTNGRVFTAALLH |
| | APQPASSTLVLCAHHLCVDMHSWYLILSTLDAVSTVNGTSNSGLHRWNDYLA |
| | SKTVDSATHESWRTVCQTLPLHFPPVSLPDDSLPRTRAWREDFRHPCVRRLF |
| | ESSGNTAYSAETYVLTALALVLRYYSEEPWCRIEMEGMGRGCWPDEPDVADT |
| | VGWFTLFYPWAIPLHGDMATLLSAIASDLAKRTHGGGDYGLLQMRHAPEDSL |
| | AQGIRMNYIGVQAQPSLRYFHIDHFNSDIYTAPENALGCVLEFNIARSAADG |
| | LSFHCRFDPTRIALNDVQLLLARYKNSLTDLDAWLCQHSATLTGAPTLWTL* |
| clbO | MAKDDFTCGSLDIAIIGMSGRFSGAESVPEWWDKLLAGEEFTQPTCTEDDNG |
| SEQ ID | NPWIRLRNIITAPYDFDAAFFNIPPGEALLMDPQQRIFLECCYNALEHAGYI |
| NO: 1098 | PTQLKRVGVYGATYANNYFIDRVYPYLKMSGDHHYLQAQIGNEKDYLCAQVA |
| | YKLGFTGPAVSVQTACSSSLVAAYLACEGLLTFQADVALAGGVTLGFLQAHG |
| | YSPQGDKLVSQDGHCAPFSAEATGTVYSSGAGVVVLKRLEDALRDQDRVYAV |
| | IKGGAVNNDGGRRLGFVAPSVEGQVEAINTALAAAEVVPTDIALIETHGTGT |
| | PLGDEIELEALHRVFAPACAPHSIQLGAVKANLGHLGVASGIVSLMKTALTL |
| | YTGLVPPQINLVNKHKKLLQPASPFYLSDVVTSVPQTKRIHATVSSFGLGGT |
| | NAHLVLQNWCETPAQAVQENERRLFFFSAKTPLALRQQLDAHYHALATYAEA |
| | DKDRIAYTLAQRRAHFPYRCALAADSVVALRASLAKLRDADMSFTPINMETT |
| | LVFLYPDRDDKLESALTHLLACQPNLRQRHQRLSQDVAQICEPADWTPALRQ |
| | FIQQVSLSEWLIEQSISPVQHIGYLTGAAAAQYVARIISLENAVQQVIVAET |
| | TPEQTLAGNSELSEILANLAVTEGTLMLEIGRAGTFSILYHQHAQWVGQTVF |
| | SPMLNTDTPEDILPLLGTLWQRGVTICLPEMPAVQTIGLPGYSFDRVRYEIQ |
| | SSDARENAMLPVSYLSVSDFVEKTWRSLLCIDHYDEHAVIFEYGATSMHVIS |
| | FVDSCNHIYKIGLTAADIYARPAIREHSEFISECVDGIL* |
| clbP | MTIMEHVSIKTLYHLLCCMLLFISAMCALAQEHEPIGAQDERLSTLIHQRMQ |
| SEQ ID | EAKVPALSVSVTIKGVRQRFVYGVADVASQKANTLDTVYELGSMSKAFTGLV |
| NO: 1099 | VQILIQEGRLRQGDDIITYLPEMRLNYQGKPASLTVADFLYHTSGLPFSTLA |
| | RLENPMPGSAVAQQLRNENLLFAPGAKFSYASANYDVLGAVIENVTGKTFTE |
| | VIAERLTQPLGMSATVAVKGDEIIVNKASGYKLGFGKPVLFHAPLARNHVPA |
| | AYIHSTLPDMEIWIDAWLHRKALPATLREAMSNSWRGNSDVPLAADNRILYA |
| | SGWFIDQNQGPYISHGGQNPNFSSCIALRPDQQIGIVALANMNSNLILQLCA |
| | DIDNYLRIGKYADGAGDAITATDTLFVYLTLLLCFWGAVVVVRGAFRVYRAT |
| | AHGPGKQQRLRLRVRDYIIALAVPGLVAAMLYVAPGILSPGLDWRFILVWGP |
| | SSVLAIPFGIILLAFVLTLNHQIKRILLHNKEWDDE* |
| clbQ | MSNISLYCLPYSGGSAAMYYKWRSVLSDNITLRPLEPAGRGTRIRQPLCLTM |
| SEQ ID | VDAVADLYQQFVKHYTGGDYAIFGHSLGGIMAFELVHYILDHGHDMPCALFF |
| NO: 1100 | SGCRPPDRASHEVILHTLPDQAFMEEIVKLGGTPVDVFRNKELMTIFTPIIK |
| | NDYRLYEQYVFQAKARTLTCPIVLFHGDADNLVMQDELLAWEKFTTRKTRTI |
| | IFPAADHFFVDKHFEQVVGYVNQTIESLEIVG* |
| clbR | MDKFKEKNPLSLRERQVLRMLAQGDEYSQISHNLNISINTVKFHVKNIKHKI |
| SEQ ID | QARNTNHAIHIANRNEII* |
| NO: 1101 | |
| clbS | MAVPSSKEELIKAINSNFSLLNKKLESITPQLAFEPLLEGHAKGTTISVANL |
| SEQ ID | VSYLIGWGELVLHWHDQEAKGKTIIFPEEGFKWNELGRLAQKFYRDYEDITE |
| NO: 1102 | YEVLLARLKENKQQLVALIERFSNDELYGKPWYNKWTRGRMIQFNTASPYKN |
| | ASGRLNKLQKCLAE* |

### Secreted EGF Polypeptides

[0119] In some embodiments, the recombinant bacteria are capable of producing EGF, particularly human EGF. EGF mediates signaling pathways by binding Epidermal Growth Factor Receptor (EGFR). The binding of EGF to EGFR promotes phosphorylation of EGFR and subsequent phosphorylation of AKT and ERK. Once cleaved and secreted, EGF functions as a cytokine to ameliorate inflammatory signals. For example, EGF can enhance goblet cell-associated mucosal integrity, while diminished EGF can be associated with inflammatory disorders. EGF plays a role in inflammatory bowel disease, with murine and human studies suggesting a protective and restorative role in disease pathogenesis and activity.

[0120] In some embodiments, the recombinant bacteria comprise a nucleic acid sequence encoding a polypeptide of Sequence A or a functional fragment thereof. In some embodiments, recombinant bacteria comprise a nucleic acid sequence that is at least about 80%, 85%, 90%, 95%, or 99% homologous to a nucleic acid sequence encoding a polypeptide of Sequence A or a functional fragment thereof.

[0121] In some embodiments, the recombinant bacteria comprise a nucleic acid sequence encoding a fusion protein which comprises a polypeptide tag of Sequence C (below) or a functional fragment thereof. In some embodiments, recombinant bacteria comprise a gene sequence encoding a fusion protein which comprises a polypeptide tag of that is at least about 80%, 85%, 90%, 95%, or 99% identity to a polypeptide tag comprising Sequence C or a functional fragment thereof. In some embodiments, the linker polypeptide has at least about 85%, 86%, 87%, 88%, 89%, 90%, 91%, 92%, 93%, 94%, 95%, 96%, 97%, 98%, or 99% identity with Sequence C. In some specific embodiments, the polypeptide tag comprises Sequence C.

Sequence C (PelB):
MKYLLPTAAAGLLLLAAQPAMA

[0122] In some embodiments, the recombinant bacteria comprise a nucleic acid sequence encoding a fusion protein which comprises a polypeptide tag of Sequence D (below) or a functional fragment thereof. In some embodiments, recombinant bacteria comprise a nucleic acid sequence encoding a fusion protein which comprises a polypeptide tag of that is at least about 80%, 85%, 90%, 95%, or 99% identity to a polypeptide tag comprising Sequence D or a functional fragment thereof. In some embodiments, the linker polypeptide has at least about 85%, 86%, 87%, 88%, 89%, 90%, 91%, 92%, 93%, 94%, 95%, 96%, 97%, 98%, or 99% identity with Sequence D. In some specific embodiments, the polypeptide tag comprises Sequence D.

Sequence D (PhoA):
MKQSTIALALLPLLFTPVTKA

[0123] In some embodiments, the recombinant bacteria comprise a nucleic acid sequence encoding a fusion protein which comprises a polypeptide tag of Sequence E (below) or a functional fragment thereof. In some embodiments, recombinant bacteria comprise a gene sequence encoding a fusion protein which comprises a polypeptide tag of that is at least about 80%, 85%, 90%, 95%, or 99% identity to a polypeptide tag comprising Sequence E or a functional fragment thereof. In some embodiments, the linker polypeptide has at least about 85%, 86%, 87%, 88%, 89%, 90%, 91%, 92%, 93%, 94%, 95%, 96%, 97%, 98%, or 99% identity with Sequence E. In some specific embodiments, the polypeptide tag comprises Sequence E.

Sequence E (OmpA):
MKKTAIAIAVALAGFATVAQA

[0124] In some embodiments, the recombinant bacteria comprise a nucleic acid sequence encoding a fusion protein which comprises a polypeptide tag of Sequence F (below) or a functional fragment thereof. In some embodiments, recombinant bacteria comprise a gene sequence encoding a fusion protein which comprises a polypeptide tag of that is at least about 80%, 85%, 90%, 95%, or 99% identity to a polypeptide tag comprising Sequence F or a functional fragment thereof. In some embodiments, the linker polypeptide has at least about 85%, 86%, 87%, 88%, 89%, 90%, 91%, 92%, 93%, 94%, 95%, 96%, 97%, 98%, or 99% identity with Sequence F. In some specific embodiments, the polypeptide tag comprises Sequence F.

Sequence F (LARD3):
IEGRGSDGNDLIQGGKGADFIEGGKGNDTIRDNSGHNTFLFSGHFGQDRI
IGYQPTDRLVFQGADGSTDLRDHAKAVGADTVLSFGADSVTLVGVGLGGL
WSEGVLIS

[0125] In some embodiments, the recombinant bacteria comprise a nucleic acid sequence encoding a fusion protein which comprises a polypeptide tag of Sequence G (below) or a functional fragment thereof. In some embodiments, recombinant bacteria comprise a gene sequence encoding a fusion protein which comprises a polypeptide tag of that is at least about 80%, 85%, 90%, 95%, or 99% identity to a polypeptide tag comprising Sequence G or a functional fragment thereof. In some embodiments, the linker polypeptide has at least about 85%, 86%, 87%, 88%, 89%, 90%, 91%, 92%, 93%, 94%, 95%, 96%, 97%, 98%, or 99% identity with Sequence G. In some specific embodiments, the polypeptide tag comprises Sequence G.

Sequence G (HylA):
STYGSQDNLNPLINEISKIISAAGNFDVKEERSAASLLQLSGNASDFSYG
RNSITLTASA

[0126] In some embodiments, the recombinant bacteria comprise a nucleic acid sequence encoding an PelB-EGF fusion protein of (Sequence H below) or a functional fragment thereof. In some embodiments, recombinant bacteria comprise a gene sequence encoding a PelB-EGF fusion protien that is at least about 80%, 85%, 90%, 95%, or 99% identity to PelB-EGF fusion protein comprising Sequence H or a functional fragment thereof. In some embodiments, the PelB-EGF fusion protein has at least about 85%, 86%, 87%, 88%, 89%, 90%, 91%, 92%, 93%, 94%, 95%, 96%, 97%, 98%, or 99% identity with Sequence H. In some specific embodiments, the PelB-EGF fusion protein comprises Sequence F.

Sequence H (PelB-EGF):
MKYLLPTAAAGLLLLAAQPAMANSDSECPLSHDGYCLHDGVCMYIEALDK
YACNCVVGYIGERCQYRDLKWWELR

[0127] In some embodiments, the recombinant bacteria comprise nucleic acid sequence encoding an PhoA-EGF fusion protein of (Sequence I below) or a functional fragment thereof. In some embodiments, recombinant bacteria comprise a gene sequence encoding a PhoA-EGF fusion protein that is at least about 80%, 85%, 90%, 95%, or 99% identity to PhoA-EGF fusion protein comprising Sequence I or a functional fragment thereof. In some embodiments, the PhoA-EGF fusion protein has at least about 85%, 86%, 87%, 88%, 89%, 90%, 91%, 92%, 93%, 94%, 95%, 96%, 97%, 98%, or 99% identity with Sequence I. In some specific embodiments, the PhoA-EGF fusion protein comprises Sequence I.

Sequence I (PhoA-EGF):
MKQSTIALALLPLLFTPVTKANSDSECPLSHDGYCLHDGVCMYIEALDKY
ACNCVVGYIGERCQYRDLKWWELR

[0128] In some embodiments, the recombinant bacteria comprise nucleic acid sequence encoding an OmpA-EGF fusion protein of (Sequence J below) or a functional fragment thereof. In some embodiments, recombinant bacteria comprise a gene sequence encoding a OmpA-EGF fusion protein that is at least about 80%, 85%, 90%, 95%, or 99% identity to OmpA-EGF fusion protein comprising Sequence J or a functional fragment thereof. In some embodiments, the OmpA-EGF fusion protein has at least about 85%, 86%, 87%, 88%, 89%, 90%, 91%, 92%, 93%, 94%, 95%, 96%, 97%, 98%, or 99% identity with Sequence J. In some specific embodiments, the OmpA-EGF fusion protein comprises Sequence J.

Sequence J (OmpA-EGF):
MKKTAIAIAVALAGFATVAQANSDSECPLSHDGYCLHDGVCMYIEALDKY
ACNCVVGYIGERCQYRDLKWWELR

[0129] In some embodiments, the recombinant bacteria comprise nucleic acid sequence encoding an EGF-LARD3 fusion protein of (Sequence K below) or a functional fragment thereof. In some embodiments, recombinant bacteria comprise a gene sequence encoding an EGF-LARD3 fusion protein that is at least about 80%, 85%, 90%, 95%, or 99% identity to EGF-LARD3 fusion protein comprising Sequence K or a functional fragment thereof. In some embodiments, the EGF-LARD3 fusion protein has at least about 85%, 86%, 87%, 88%, 89%, 90%, 91%, 92%, 93%, 94%, 95%, 96%, 97%, 98%, or 99% identity with Sequence K. In some specific embodiments, the EGF-LARD3 fusion protein comprises Sequence K.

Sequence K (EGF-LAKDS):
MNSDSECPLSHDGYCLHDGVCMYIEALDKYACNCVVGYIGERCQYRDLKW
WELRIEGRGSDGNDLIQGGKGADFIEGGKGNDTIRDNSGHNTFLFSGHFG
QDRIIGYQPTDRLVFQGADGSTDLRDHAKAVGADTVLSFGADSVTLVGVG
LGGLWSEGVLIS

[0130] In some embodiments, the recombinant bacteria comprise nucleic acid sequence encoding an OmpA-EGF fusion protein of (Sequence L below) or a functional fragment thereof. In some embodiments, recombinant bacteria comprise a gene sequence encoding a OmpA-EGF fusion protein that is at least about 80%, 85%, 90%, 95%, or 99% identity to OmpA-EGF fusion protein comprising Sequence L or a functional fragment thereof. In some embodiments, the OmpA-EGF fusion protein has at least about 85%, 86%, 87%, 88%, 89%, 90%, 91%, 92%, 93%, 94%, 95%, 96%, 97%, 98%, or 99% identity with Sequence L. In some specific embodiments, the OmpA-EGF fusion protein comprises Sequence L.

Sequence L (EGF-HylA):
MNSDSECPLSHDGYCLHDGVCMYIEALDKYACNCVVGYIGERCQYRDLKW
WELRSTYGSQDNLNPLINEISKIISAAGNFDVKEERSAASLLQLSGNASD
FSYGRNSITLTASAIn

some embodiments, the recombinant bacteria comprise a nucleic acid sequence encoding a polypeptide set forth in Table 4 or a functional fragment thereof. In some embodiments, recombinant bacteria comprise a nucleic acid sequence that is at least about 80%, 85%, 90%, 95%, or 99% homologous to a nucleic acid sequence encoding a polypeptide set forth in Table 4 or a functional fragment thereof.

[0131] In some embodiments, the recombinant bacteria comprise a nucleic acid sequence set forth in Table 5 or a functional fragment thereof. In some embodiments, recombinant bacteria comprise a nucleic acid sequence that is at least about 80%, 85%, 90%, 95%, or 99% homologous to a nucleic acid sequence set forth in Table 5 or a functional fragment thereof.

TABLE 4
Non-limiting EGF constructs

| Description | SEQUENCE |
|---|---|
| Construct comprising | MKYLLPTAAAGLLLLAAQPAMANSDSECPLSHDGYCLHDGVCMYI |
| secretion tag pelB, | EALDKYACNCVVGYIGERCQYRDLKWWELR |
| and E. coli codon- | |
| optimized human | |
| EGF | |
| Construct comprising | MKKTAIAIAVALAGFATVAQANSDSECPLSHDGYCLHDGVCMYIE |
| secretion tag, OmpA, | ALDKYACNCVVGYIGERCQYRDLKWWELR |
| and E. coli codon- | |
| optimized human | |
| EGF | |
| Construct comprising | MKQSTIALALLPLLFTPVTKANSDSECPLSHDGYCLHDGVCMYIE |
| secretion tag, PhoA, | ALDKYACNCVVGYIGERCQYRDLKWWELR |
| and E. coli codon- | |
| optimized human | |
| EGF | |
| Construct comprising | MNSDSECPLSHDGYCLHDGVCMYIEALDKYACNCVVGYIGERCQY |
| E. coli codon- | RDLKWWELRIEGRGSDGNDLIQGGKGADFIEGGKGNDTIRDNSGH |
| optimized human | NTFLFSGHFGQDRIIGYQPTDRLVFQGADGSTDLRDHAKAVGADT |
| EGF and secretion | VLSFGADSVTLVGVGLGGLWSEGVLIS |
| tag, LARD3 | |
| Construct comprising | MNSDSECPLSHDGYCLHDGVCMYIEALDKYACNCVVGYIGERCQY |
| E. coli codon- | RDLKWWELRSTYGSQDNLNPLINEISKIISAAGNFDVKEERSAAS |
| optimized human | LLQLSGNASDFSYGRNSITLTASA |
| EGF and secretion | |
| tag, HylA | |
| pelB Secretion Tag | MKYLLPTAAAGLLLLAAQPAMA |
| OmpA Secretion Tag | MKKTAIAIAVALAGFATVAQA |
| PhoA Secretion Tag | MKQSTIALALLPLLFTPVTKA |
| LARD3 Secretion | IEGRGSDGNDLIQGGKGADFIEGGKGNDTIRDNSGHNTFLFSGHF |
| Tag | GQDRIIGYQPTDRLVFQGADGSTDLRDHAKAVGADTVLSFGADSV |
| | TLVGVGLGGLWSEGVLIS |
| HylA Secretion Tag | STYGSQDNLNPLINEISKIISAAGNFDVKEERSAASLLQLSGNAS |
| | DFSYGRNSITLTASA |
| E. coli codon- | NSDSECPLSHDGYCLHDGVCMYIEALDKYACNCVVGYIGERCQYR |
| optimized human | DLKWWELR |
| EGF | |

TABLE 5
Non-limiting EGF constructs

| Description | SEQUENCE |
|---|---|
| Construct | atgaaatatctgttgcccacggctgccgcgggtctgctgctgctgg |
| comprising | cagcgcaaccggctatggcaAATAGTGACAGCGAATGTCCGCTGTC |
| secretion tag pelB, | GCACGATGGTTATTGCCTTCATGATGGGGTGTGCATGTACATTGAG |
| and E. coli codon- | GCATTGGACAAATATGCCTGCAACTGTGTTGTCGGCTATATCGGCG |
| optimized human | AACGGTGTCAGTACCGTGATCTGAAATGGTGGGAATTACGCtaa |
| EGF | |
| Construct | ATGAAGAAAACCGCAATTGCAATCGCCGTCGCTCTGGCGGGGTTCG |
| comprising | CTACGGTCGCCCAAGCCAATAGTGACAGCGAATGTCCGCTGTCGCA |
| secretion tag, | CGATGGTTATTGCCTTCATGATGGGGTGTGCATGTACATTGAGGCA |
| OmpA, and E. coli | TTGGACAAATATGCCTGCAACTGTGTTGTCGGCTATATCGGCGAAC |
| codon-optimized | GGTGTCAGTACCGTGATCTGAAATGGTGGGAATTACGCtaa |
| human EGF | |
| Construct | atgaaacaaagcactattgcactggcactcttaccgttactgttta |
| comprising | cccctgtgacaaaagcgAATAGTGACAGCGAATGTCCGCTGTCGCA |
| secretion tag, | CGATGGTTATTGCCTTCATGATGGGGTGTGCATGTACATTGAGGCA |
| PhoA, and E. coli | TTGGACAAATATGCCTGCAACTGTGTTGTCGGCTATATCGGCGAAC |
| codon-optimized | GGTGTCAGTACCGTGATCTGAAATGGTGGGAATTACGCtaa |
| human EGF | |
| Construct | ATGAATAGTGACAGCGAATGTCCGCTGTCGCACGATGGTTATTGCC |
| comprising E. coli | TTCATGATGGGGTGTGCATGTACATTGAGGCATTGGACAAATATGC |
| codon-optimized | CTGCAACTGTGTTGTCGGCTATATCGGCGAACGGTGTCAGTACCGT |
| human EGF and | GATCTGAAATGGTGGGAATTACGCATTGAGGGCCGGggttctgacg |
| secretion tag, | gtaatgatcttatccaaggggtaagggcgcggacttcattgaaggc |
| LARD3 | ggcaaaggtaatgatacaatccgcgataactccggtcacaacacct |
| | ttttgttctcagggcattttggtcaggatcgtattataggatatca |
| | gccgaccgatcggctggtattccagggcgctgacggcagcacggat |
| | ctgcgcgaccatgcgaaagccgttggagcagatacggtgctgagtt |
| | ttggcgccgattcggttactctcgtcggggggggttaggaggcctg |
| | tggagcgagggtgtgctgattagttaa |
| Construct | ATGAATAGTGACAGCGAATGTCCGCTGTCGCACGATGGTTATTGCC |
| comprising E. coli | TTCATGATGGGGTGTGCATGTACATTGAGGCATTGGACAAATATGC |
| codon-optimized | CTGCAACTGTGTTGTCGGCTATATCGGCGAACGGTGTCAGTACCGT |
| human EGF and | GATCTGAAATGGTGGGAATTACGCtcaacttatgggagccaggaca |
| secretion tag, HylA | atcttaatccattaattaatgaaatcagcaaaatcatttcagctgc |
| | aggtaacttcgatgttaaggaggaaagatctgccgcttctttattg |
| | cagttgtccggtaatgccagtgatttttcatatggacggaactcaa |
| | taactttgacagcatcagcataa |
| pelB Secretion Tag | atgaaatatctgttgcccacggctgccgcgggtctgctgctgctgg |
| | cagcgcaaccggctatggca |
| OmpA Secretion | ATGAAGAAAACCGCAATTGCAATCGCCGTCGCTCTGGCGGGGTTCG |
| Tag | CTACGGTCGCCCAAGCC |
| PhoA Secretion | atgaaacaaagcactattgcactggcactcttaccgttactgttta |
| Tag | cccctgtgacaaaagcg |
| LARD3 Tag | attgagggccggggttctgacggtaatgatcttatccaaggcggta |
| | agggcgcggacttcattgaaggcggcaaaggtaatgatacaatccg |
| | cgataactccggtcacaacacctttttgttctcagggcattttggt |
| | caggatcgtattataggatatcagccgaccgatcggctggtattcc |
| | agggcgctgacggcagcacggatctgcgcgaccatgcgaaagccgt |
| | tggagcagatacggtgctgagttttggcgccgattcggttactctc |
| | gtcggggggggttaggaggcctgtggagcgagggtgtgctgattag |
| | ttaa |
| HlyA Tag | tcaacttatgggagccaggacaatcttaatccattaattaatgaaa |
| | tcagcaaaatcatttcagctgcaggtaacttcgatgttaaggagga |
| | aagatctgccgcttctttattgcagttgtccggtaatgccagtgat |
| | ttttcatatggacggaactcaataactttgacagcatcagcataa |
| E. coli codon- | AATAGTGACAGCGAATGTCCGCTGTCGCACGATGGTTATTGCCTTC |
| optimized human | ATGATGGGGTGTGCATGTACATTGAGGCATTGGACAAATATGCCTG |
| EGF | CAACTGTGTTGTCGGCTATATCGGCGAACGGTGTCAGTACCGTGAT |
| | CTGAAATGGTGGGAATTACGCTAA |

[0132] In some embodiments, the recombinant bacteria are capable of producing EGF under inducing conditions, e.g., under a condition(s) associated with inflammation. In some embodiments, the recombinant bacteria are capable of producing EGF in low-oxygen conditions.

[0133] In some embodiments, the recombinant bacteria comprise one or more gene sequence(s) selected from PhoA-EGF, OmpF-EGF, and TorA-EGF.

[0134] In some embodiments, the recombinant bacteria comprise gene(s) encoding an ATP binding cassette transporter or a portion thereof, e.g., one, two, three, or more subunits of an ATP binding cassette transporter as described herein. ATP binding cassette transporters are known in the art and described herein.

[0135] In some embodiments, the recombinant bacteria comprise nucleic acid sequence encoding an ATP binding cassette transporter of Sequence M.1, M.2, and/or M.3 below or a functional fragment thereof. In some embodiments, recombinant bacteria comprise a gene sequence encoding a ATP binding cassette transporter that is at least about 80%, 85%, 90%, 95%, or 99% identity to ATP binding cassette transporter comprising M.1, M.2, and/or M.3 or a functional fragment thereof. In some embodiments, the ATP binding cassette transporter has at least about 85%, 86%, 87%, 88%, 89%, 90%, 91%, 92%, 93%, 94%, 95%, 96%, 97%, 98%, or 99% identity with Sequence M.1, M.2, and/or M.3. In some specific embodiments, the ATP binding cassette transporter protein comprises Sequence M.1, M.2, and/or M.3.

Sequence M.1 (prtD)
MNASSERDRSLFGVLRQFRRSFWSVGIFSAVINVLMLAPSVYMLQVYDRV
LASGNGITLLMLTLLMAGLCAFMGALEWVRSLLVVRLGTRIDLALNQDVF
NAAFARNLEAGDGRAGLALTDLTLLRQFITGNALFAFFDVPWFPLFLLVL
FLLHPWLGMLALGGTVVLVALAWLNQHLTNQPLAEANQQSQQATHLADAQ
LRNADVIEAMGMLGNLRRRWLARHYRFISLQNLASERAAAVGGASKYSRI
ALQSLMLGLGALLAIDGKITPGMMIAGSILVGRVLSPIDQLIGVWKQWSS
ARIAWQRLTRLIAAYPPRPAAMALPAPEGHLSVEQVSLRTVQGNTRLQNI
HFSLQAGETLVILGASGSGKSSLARLLVGAQSPTQGKVRLDGADLNQVDK
NTFGPTIGYLPQDVQLFKGSLAENIARFGDADPEKVVAAAKLAGVHELIL
SLPNGYDTELGDGGGGLSGGQRQRIGLARAMYGDPCLLILDEPNASLDSE
GDQALMQAIVALQKRGATVVLITHRPALTTLAQKILILHEGQQQRMGLAR
DVLTELQQRSAANQARMNPTAAMPQ
Sequence M.2 (prtE)
MTGMDITTQDELNEAAMRDRASRDEERALRLGWWLVLAGFGGFLLWALLA
PLDKGVAVQGNVVVSGNRKVIQHMQGGIVDRIQVKDGDRVAAGQVLLTLN
AVDARTTSEGLGSQYDQLIAREARLLAEQRNQSSLAATPRLAQARQRPEM
AAIIALQEDLLRSRQQSLKLEIDGVRASIDGLETSLGALQKVMSSKQSEQ
ATLSQQLQGLRPLAADNYVPRNKMLETERLFAQVSGELAQTSGEVGRTRR
DIQQQKLRIAQRQQEYDKEVNSELSDVQAKLNEVISQREKADFNLANVQV
RAPVAGTVVDMKIFTEGGVIAPGQVMMDIVPEDQPLLVDGRIPVEMVDKV
WSGLPVELQFTAFSQSTTPRVPGTVTLLSADRLVDEKDGTPYYGLRIQVS
EEGKRSLHGLEIKPGMPVQGFVRTGERSFINYLFKPLMDRMHLALTEE
Sequence M.3 (prtF)
MRRKAVLLTVVLSLSCGSAQAMGLLDAWELALRNDAQLRAAGFERDAGQE
EVAIGRAGLLPSLQYTYGANYSHSKVTQRDRTLNNTTKRDYDNYVSTLTL
RQPLLDYAAWARYQQGVTRKLMADQRFRDRSQDLMVRLYQSWSEALLAQE
KLMLLDAQRRAYQEQLALNRRLLAAGEGTQTDLRETEARYTVTEAQRIEQ
EDTLDAAMTDLENMMGSPLQIQDLSPLALDTLPDNVTENRSLSQWRELTV
RHNAKLAVQRENVDYSRYEIERNRAGHLPTLDLVASTRNSLSESEYNYNQ
KYDTQTVGLQVRVPLYSGGAVSASMRQAAAEYQQSQAELDNQTRQTFAEL
RRQFNLCANGAAKIRAWQMSVAAAEEAIRATRQSVAGGERINLDVLMAEQ
EWYNARRELTEVKYRWLQAWLNLRYTAGTLNEQDMMQLAAWFQSAPVINK
TGINKTGINAATGNKTN

[0136] In some embodiments, the recombinant bacteria comprise a gene sequence encoding a linker fusion protein which comprises SEQ ID NO: 498 or a functional fragment thereof. In some embodiments, recombinant bacteria comprise a gene sequence encoding a linker polypeptide that has at least about 80%, 85%, 90%, 95%, or 99% identity to linker polypeptide comprising SEQ ID NO: 498 or a functional fragment thereof. In some embodiments, the linker polypeptide has at least about 85%, 86%, 87%, 88%, 89%, 90%, 91%, 92%, 93%, 94%, 95%, 96%, 97%, 98%, or 99% identity with SEQ ID NO: 498. In some specific embodiments, the linker polypeptide comprises SEQ ID NO: 498. In some embodiments, the gene sequence encoding ECOLIN 19410 secretion tag further comprises SEQ ID NO: 498. In some embodiments, the recombinant bacteria comprise gene sequence encoding a linker fusion protein. In certain embodiments, the linker fusion protein gene sequence has at least about 80%, 85%, 90%, 95%, or 99% identity with SEQ ID NO: 494. In some embodiments, the linker gene sequence has at least about 85%, 86%, 87%, 88%, 89%, 90%, 91%, 92%, 93%, 94%, 95%, 96%, 97%, 98%, or 99% identity with SEQ ID NO: 494. In some specific embodiments, the linker gene sequence comprises SEQ ID NO: 494.

[0137] In any of these embodiments, the recombinant bacteria may further comprise gene sequences encoding a secretion tag. Non-limiting examples of such secretion tags are described herein and include PhoA, OmpF, cvaC, TorA, fdnG, dmsA, PelB, the ECOLIN_05715 secretion signal, ECOLIN_16495 secretion signal, ECOLIN_19410 secretion signal, and the ECOLIN_19880 secretion signal. In some embodiments, the secretion tag is PhoA. In some embodiments, the PhoA secretion tag comprises SEQ ID NO: 385. In some embodiments, the PhoA secretion tag comprises SEQ ID NO: 386.

[0138] In some embodiments, the recombinant bacteria produce 0% to 2%, 2% to 4%, 4% to 6%, 6% to 8%, 8% to 10%, 10% to 12%, 12% to 14%, 14% to 16%, 16% to 18%, 18% to 20%, 20% to 25%, 25% to 30%, 30% to 35%, 35% to 40%, 40% to 45%, 45% to 50%, 50% to 55%, 55% to 60%, 60% to 65%, 65% to 70%, 70% to 80%, 80% to 90%, or 90% to 100% more EGF than unmodified bacteria of the same bacterial subtype under the same conditions. In yet another embodiment, the recombinant bacteria produce 1.0-1.2-fold, 1.2-1.4-fold, 1.4-1.6-fold, 1.6-1.8-fold, 1.8-2-fold, or two-fold more EGF than unmodified bacteria of the same bacterial subtype under the same conditions. In yet another embodiment, the recombinant bacteria produce three-fold, four-fold, five-fold, six-fold, seven-fold, eight-fold, nine-fold, ten-fold, fifteen-fold, twenty-fold, thirty-fold, forty-fold, or fifty-fold, more EGF, than unmodified bacteria of the same bacterial subtype under the same conditions.

[0139] In any of these embodiments, the EGF constructs described herein may further comprise a secretion tag. Non-limiting examples of secretion tags are described herein. The secretion tag is at the N-terminus or at the C-terminus.

[0140] In any of these embodiments, the recombinant bacteria may further comprise gene sequences encoding a secretion tag. Non-limiting examples of such secretion tags are described herein and include PhoA, OmpF, cvaC, TorA, fdnG, dmsA, PelB, the ECOLIN_05715 secretion signal, ECOLIN_16495 secretion signal, ECOLIN_19410 secretion signal, and the ECOLIN_19880 secretion signal. In some embodiments, the secretion tag is PhoA. In some embodiments, the secretion tag is ECOLIN 19410. The recombinant bacteria may further comprise one or more mutations to outer membrane proteins, i.e., to generate a diffusible outer membrane phenotype (DOM). Non-limiting examples of such outer membrane proteins are described herein and include lpp, nlP, tolA, and pal. In one embodiment, the recombinant bacteria comprise a deletion or mutation in pal. In some embodiments, the recombinant bacterium, e.g., Gram-negative bacterium, e.g., E. coli Nissle, may be engineered by deleting the gene encoding the periplasmic protein pal to create a diffusible outer membrane (DOM) phenotype, e.g., to result in a “leaky membrane” bacterium and increase the rate of diffusion of periplasmic proteins to the external environment without compromising cell growth properties.

[0141] In some embodiments, the genetically engineered are capable of producing and secreting EGF. In some embodiments, the EGF gene is functionally replaced, modified, and/or mutated in order to enhance stability and/or increase EGF production or secretion. In some embodiments, the recombinant bacteria are capable of expressing and secreting EGF in low-oxygen conditions, in the presence of certain molecules or metabolites, in the presence of molecules or metabolites associated with inflammation or an inflammatory response, or in the presence of some other metabolite that may or may not be present in the gut, such as arabinose. Exemplary chemical inducers are described herein.

[0142] In one embodiment, the EGF gene is directly operably linked to a first promoter. In another embodiment, the EGF gene is indirectly operably linked to a first promoter. In one embodiment, the promoter is not operably linked with the EGF gene in nature.

[0143] In some embodiments, the EGF gene is expressed under the control of a constitutive promoter. In another embodiment, the EGF gene is expressed under the control of an inducible promoter. In some embodiments, the EGF gene is expressed under the control of a promoter that is directly or indirectly induced by exogenous environmental conditions. In one embodiment, the EGF gene is expressed under the control of a promoter that is directly or indirectly induced by low-oxygen or anaerobic conditions, wherein expression of the EGF gene is activated under low-oxygen or anaerobic environments, such as the environment of the mammalian gut. In one embodiment, the EGF gene is expressed under the control of a temperature-sensitive promoter, e.g., a promoter that is directly or indirectly induced by a temperature between 37° C. and 42° C. Inducible promoters are described in more detail herein.

[0144] The EGF gene may be present on a plasmid or chromosome in the bacterial cell. In one embodiment, the EGF gene is located on a plasmid in the bacterial cell. In another embodiment, the EGF gene is located in the chromosome of the bacterial cell. In yet another embodiment, a native copy of the EGF gene is located in the chromosome of the bacterial cell. The EGF gene may be expressed on a low-copy plasmid or a high-copy plasmid. The high-copy plasmid may be useful for increasing expression of EGF.

[0145] In particular embodiments, the bacterium comprises a gene sequence encoding EGF operably linked to a thermoregulated promoter, e.g., cI857; a gene sequence encoding an N-terminal OmpA secretion tag operably linked to the gene sequence encoding EGF; a modification, e.g., knockout, in the Phage 3 genome; a modification, e.g., knockout, in the colibactin pks island; a thymidine auxotrophy, as disclosed herein.

[0146] In particular embodiments, the bacterium comprises a gene sequence encoding EGF operably linked to a thermoregulated promoter, e.g., cI857; a gene sequence encoding an N-terminal OmpA secretion tag operably linked to the EGF gene sequence; a modification, e.g., knockout, in the Phage 3 genome; a modification, e.g., knockout, in the colibactin pks island; a thymidine auxotrophy; and ¦pal (diffusible outer membrane), as disclosed herein.

[0147] In particular embodiments, the bacterium comprises a gene sequence encoding EGF operably linked to an oxygen level-dependent promoter, e.g., FNR-responsive promoter; a gene sequence encoding an N-terminal OmpA secretion tag operably linked to the EGF gene sequence; a modification, e.g., knockout, in the Phage 3 genome; a modification, e.g., knockout, in the colibactin pks island; a thymidine auxotrophy, as disclosed herein.

[0148] In particular embodiments, the bacterium comprises a gene sequence encoding EGF operably linked to an oxygen level-dependent promoter, e.g., FNR-responsive promoter; a gene sequence encoding an N-terminal OmpA secretion tag operably linked to the EGF gene sequence; a modification, e.g., knockout, in the Phage 3 genome; a modification, e.g., knockout, in the colibactin pks island; a thymidine auxotrophy; and Δpal (diffusible outer membrane), as disclosed herein.

[0149] In particular embodiments, the gene sequences encoding the EGF constructs comprising gene sequences encoding EGF operably linked to an inducible promoter, e.g., an oxygen level-dependent or temperature sensitive promoter, and the gene sequence encoding an N-terminal OmpA secretion tag operably linked to the EGF gene sequence may be integrated into the bacterial chromosome. In some embodiments, the bacterium comprises a single integrated copy of such an EGF gene sequence (i.e., OmpA-EGF). In some embodiments, the genetically engineered bacterium comprises multiple integrated copies of the EGF gene sequence. The multiple copies may be present at the same genomic integration site, e.g., arranged in tandem. In some embodiments, each copy of the EGF gene sequence may be operably linked to the same copy of the same promoter. In some embodiments, each copy of the EGF gene sequence may be operably linked to a different copy of the same promoter or different promoters. Alternatively, multiple copies of EGF gene sequences may be integrated at multiple distinct genomic integration sites, wherein each copy of EGF gene sequence is operably linked to a distinct instance of the promoter. In some embodiments, the promoters are multiple instances of the same promoter. In some embodiments, the promoters are multiple instances of different promoters. In some embodiments, the promoters are inducible promoters, such as a low oxygen inducible FNR promoter, a temperature sensitive promoter, or an IPTG inducible promoter.

[0150] In a particular embodiment, the bacterium comprises two copies of EGF gene sequences, wherein the two copies of the gene sequences are integrated at two distinct integration sites, and wherein each copy of the EGF gene sequence is operably linked to a separate instance of the same promoter. In a particular embodiment, the bacterium comprises three copies of the EGF gene sequences, wherein the three copies of the gene sequences each are integrated at three distinct integration sites, and wherein each copy of the EGF gene is operatively linked to a separate instance of the same promoter. In some embodiments, the promoter is an inducible promoter, e.g., a low oxygen inducible promoter (e.g., FNR promoter), a temperature sensitive promoter, or an IPTG inducible promoter.

[0151] In any of these embodiments, the EGF gene sequences may be operably linked to a gene sequence encoding an N-terminal OmpA secretion tag.

[0152] In any of these embodiments, the bacterium may further comprise one or more of (1) a knockout in the Phage 3 genome; (2) a modification, e.g., knockout, in the colibactin pks island; (3) a thymidine auxotrophy; and (4) Δpal (diffusible outer membrane), as disclosed herein.

[0153] In some embodiments, the recombinant bacteria are capable of secreting about 0.1, 0.2, 0.3, 0.4, 0.5, 0.6, 0.7, 0.8, 0.9, or 1.0 ug EGF/5e11 cells over 4 hours under inducing conditions, e.g., under low oxygen or anaerobic inducing conditions.

[0154] In some embodiments, the recombinant bacteria are capable of secreting about 1, 1.5, 2, 2.5, 3, 3.5, 4, 4.5, 5, 5.5, 6, 6.5, 7, 7.5, 8, 8.5, 9, 9.5, or 10 ug EGF/5e11 cells over 4 hours under inducing conditions, e.g., under low oxygen or anaerobic inducing conditions.

[0155] In some embodiments, the recombinant bacteria are capable of secreting about 10, 20, 30, 40, 50, 60, 70, 80, 90, 100, 110, or 120 ug EGF/5e11 cells over 4 hours under inducing conditions, e.g., under low oxygen or anaerobic inducing conditions.

[0156] In some embodiments, the recombinant bacteria are capable of secreting at least about 110, 120, 130, 140, 150, 160, 170, 180, 190, or 200 g EGF/5e11 cells over 4 hours under inducing conditions, e.g., under low oxygen or anaerobic inducing conditions.

[0157] In some embodiments, the recombinant bacteria are capable of secreting at least about 210, 220, 230, 240, 250, 260, 270, 280, 290, or 300 μg EGF/5e11 cells over 4 hours under inducing conditions, e.g., under low oxygen or anaerobic inducing conditions.

[0158] In some embodiments, the recombinant bacteria are capable of secreting at least about 350, 400, 450, 500, 550, 600, 650, 700, 750, or 800 μg EGF/5e11 cells over 4 hours under inducing conditions, e.g., under low oxygen or anaerobic inducing conditions.

[0159] In some embodiments, the recombinant bacteria are capable of secreting about 0.1, 0.2, 0.3, 0.4, 0.5, 0.6, 0.7, 0.8, 0.9, or 1.0 ug EGF/5e11 cells over 8 hours under inducing conditions, e.g., under low oxygen or anaerobic inducing conditions.

[0160] In some embodiments, the recombinant bacteria are capable of secreting about 1, 1.5, 2, 2.5, 3, 3.5, 4, 4.5, 5, 5.5, 6, 6.5, 7, 7.5, 8, 8.5, 9, 9.5, or 10 ug EGF/5e11 cells over 8 hours under inducing conditions, e.g., under low oxygen or anaerobic inducing conditions.

[0161] In some embodiments, the recombinant bacteria are capable of secreting about 10, 20, 30, 40, 50, 60, 70, 80, 90, 100, 110, or 120 ug/mL EGF/5e11 cells over 8 hours under inducing conditions, e.g., under low oxygen or anaerobic inducing conditions.

[0162] In some embodiments, the recombinant bacteria are capable of secreting at least about 40, 50, 60, 70, 80, 90, or 100 μg EGF/5e11 cells over 8 hours under inducing conditions, e.g., under low oxygen or anaerobic inducing conditions.

[0163] In some embodiments, the recombinant bacteria are capable of secreting at least about 110, 120, 130, 140, 150, 160, 170, 180, 190, or 200 g EGF/5e11 cells over 8 hours under inducing conditions, e.g., under low oxygen or anaerobic inducing conditions.

[0164] In some embodiments, the recombinant bacteria are capable of secreting at least about 210, 220, 230, 240, 250, 260, 270, 280, 290, or 300 μg EGF/5e11 cells over 8 hours under inducing conditions, e.g., under low oxygen or anaerobic inducing conditions.

[0165] In some embodiments, the recombinant bacteria are capable of secreting at least about 310, 320, 330, 340, 350, 360, 370, 380, 390, or 400 μg EGF/5e11 cells over 8 hours under inducing conditions, e.g., under low oxygen or anaerobic inducing conditions.

[0166] In some embodiments, the recombinant bacteria are capable of secreting at least about 410, 420, 430, 440, 450, 460, 470, 480, 490, or 500 μg EGF/5e11 cells over 8 hours under inducing conditions, e.g., under low oxygen or anaerobic inducing conditions.

[0167] In some embodiments, the recombinant bacteria are capable of secreting at least about 510, 520, 530, 540, 550, 560, 570, 580, 590, or 600 μg EGF/5e11 cells over 8 hours under inducing conditions, e.g., under low oxygen or anaerobic inducing conditions.

[0168] In some embodiments, the recombinant bacteria are capable of secreting at least about 610, 620, 630, 640, 650, 660, 670, 680, 690, or 700 μg EGF/5e11 cells over 8 hours under inducing conditions, e.g., under low oxygen or anaerobic inducing conditions.

[0169] In some embodiments, the recombinant bacteria are capable of secreting at least about 710, 720, 730, 740, 750, 760, 770, 780, 790, or 800 μg EGF/5e11 cells over 8 hours under inducing conditions, e.g., under low oxygen or anaerobic inducing conditions.

[0170] In some embodiments, the recombinant bacteria are capable of secreting at least about 350, 400, 450, 500, 550, 600, 650, 700, 750, or 800 μg EGF/5e11 cells over 8 hours under inducing conditions, e.g., under low oxygen or anaerobic inducing conditions.

[0171] In some embodiments, the recombinant bacteria are capable of secreting about 0.1, 0.2, 0.3, 0.4, 0.5, 0.6, 0.7, 0.8, 0.9, or 1.0 ug EGF/5e11 cells over 5 hours under inducing conditions, e.g., under low oxygen or anaerobic inducing conditions.

[0172] In some embodiments, the recombinant bacteria are capable of secreting about 1, 1.5, 2, 2.5, 3, 3.5, 4, 4.5, 5, 5.5, 6, 6.5, 7, 7.5, 8, 8.5, 9, 9.5, or 10 ug EGF/5e11 cells over 5 hours under inducing conditions, e.g., under low oxygen or anaerobic inducing conditions.

[0173] In some embodiments, the recombinant bacteria are capable of secreting about 10, 20, 30, 40, 50, 60, 70, 80, 90, 100, 110, or 120 ug EGF/5e11 cells over 5 hours under inducing conditions, e.g., under low oxygen or anaerobic inducing conditions.

[0174] In some embodiments, the recombinant bacteria are capable of secreting at least 110, 120, 130, 140, 150, 160, 170, 180, 190, or 200 μg EGF/5e11 cells over 5 hours under inducing conditions, e.g., under low oxygen or anaerobic inducing conditions.

[0175] In any of the embodiments above, inducing conditions may be low oxygen or anaerobic inducing conditions or, alternatively, inducing conditions may be a temperature between about 37° C. and 42° C. In some embodiments, inducing conditions may be the presence of an inducer, such as IPTG. In some specific embodiments, the inducing conditions are low oxygen or anaerobic inducing conditions. In some specific embodiments, the inducing conditions are a temperature between about 37° C. and about 42° C.

### Inducible Regulatory Regions

[0176] Herein the terms “payload” “polypeptide of interest” or “polypeptides of interest”, “protein of interest”, “proteins of interest”, “payloads” “effector molecule”, “effector” refers to one or more effector molecules described herein and/or one or more enzyme(s) or polypeptide(s) that function as enzymes for the production and secretion of such effector molecules, e.g., EGF.

[0177] In some embodiments, the bacterial cell comprises a stably maintained plasmid or chromosome carrying the gene(s) encoding payload (s), such that the payload(s) can be expressed in the host cell, and the host cell is capable of survival and/or growth in vitro, e.g., in medium, and/or in vivo, e.g., in the gut. In some embodiments, bacterial cell comprises two or more distinct payloads or operons, e.g., two or more payload genes. In some embodiments, bacterial cell comprises three or more distinct transporters or operons, e.g., three or more payload genes. In some embodiments, bacterial cell comprises 4, 5, 6, 7, 8, 9, 10, or more distinct payloads or operons, e.g., 4, 5, 6, 7, 8, 9, 10, or more payload genes.

[0178] Additional effector molecules, e.g., therapeutic polypeptides, which can be secreted are described in PCT/US2017/013072, filed Jan. 11, 2017; PCT/US2017/016609, filed Feb. 3, 2017; PCT/US2016/039444, filed Jun. 24, 2016; PCT/US2016/069052, filed Dec. 28, 2016; PCT/US2017/012946, filed Jan. 11, 2017; PCT/US2017/017552, filed Feb. 10, 2017; PCT/US2017/017563, filed Feb. 10, 2017, the contents of which is herein incorporated by reference in its entirety.

[0179] In some embodiments, the recombinant bacteria comprise multiple copies of the same payload gene(s). In some embodiments, the gene encoding the payload is present on a plasmid and operably linked to a directly or indirectly inducible promoter. In some embodiments, the gene encoding the payload is present on a plasmid and operably linked to a constitutive promoter. In some embodiments, the gene encoding the payload is present on a plasmid and operably linked to a promoter that is induced under low-oxygen or anaerobic conditions. In some embodiments, the gene encoding the payload is present on a plasmid and operably linked to a temperature sensitive promoter. In some embodiments, the gene encoding the payload is present on plasmid and operably linked to a promoter that is induced by exposure to tetracycline or arabinose, or another chemical or nutritional inducer described herein.

[0180] In some embodiments, the gene encoding the payload is present on a chromosome and operably linked to a directly or indirectly inducible promoter. In some embodiments, the gene encoding the payload is present on a chromosome and operably linked to a constitutive promoter. In some embodiments, the gene encoding the payload is present in the chromosome and operably linked to a promoter that is induced under low-oxygen or anaerobic conditions. In some embodiments, the gene encoding the payload is present in the chromosome and operably linked to a temperature sensitive promoter. In some embodiments, the gene encoding the payload is present on chromosome and operably linked to a promoter that is induced by exposure to tetracycline or arabinose, or another chemical or nutritional inducer described herein.

[0181] In some embodiments, the recombinant bacteria comprise two or more payloads, all of which are present on the chromosome. In some embodiments, the recombinant bacteria comprise two or more payloads, all of which are present on one or more same or different plasmids. In some embodiments, the recombinant bacteria comprise two or more payloads, some of which are present on the chromosome and some of which are present on one or more same or different plasmids.

[0182] In any of the nucleic acid embodiments described above, an EGF payload is operably linked to one or more directly or indirectly inducible promoter(s). In some embodiments, the one or more payload(s) are operably linked to a directly or indirectly inducible promoter that is induced under exogeneous environmental conditions, e.g., conditions found in the gut, e.g., induced by metabolites found in the gut, or other specific conditions. In some embodiments, the one or more payload(s) are operably linked to a directly or indirectly inducible promoter that is temperature sensitive or induced under low-oxygen or anaerobic conditions, or induced under inflammatory conditions (e.g., RNS, ROS), as described herein. In some embodiments, the one or more payload(s) are operably linked to a directly or indirectly inducible promoter that is induced under immunosuppressive conditions, e.g., as found in the tumor, as described herein. In some embodiments, the two or more gene sequence(s) are linked to a directly or indirectly inducible promoter that is induced by exposure a chemical or nutritional inducer, which may or may not be present under in vivo conditions and which may be present during in vitro conditions (such as strain culture, expansion, manufacture), such as tetracycline or arabinose, or others described herein. In some embodiments, the two or more payloads are all linked to a constitutive promoter, as described herein.

[0183] In some embodiments, the promoter is induced under in vivo conditions, e.g., the gut, as described herein. In some embodiments, the promoter is induced under in vitro conditions, e.g., various cell culture and/or cell manufacturing conditions, as described herein.

[0184] In some embodiments, the promoter that is operably linked to the gene encoding the payload is directly induced by exogenous environmental conditions (e.g., in vivo and/or in vitro and/or production/manufacturing conditions).

[0185] In some embodiments, the promoter is directly or indirectly induced by exogenous environmental conditions specific to the gut of a mammal, e.g., to the small intestine of a mammal. In some embodiments, the promoter is directly or indirectly induced by low-oxygen or anaerobic conditions such as the environment of the mammalian gut. In some embodiments, the promoter is a temperature sensitive promoter. In some embodiments, the promoter is directly or indirectly induced by molecules or metabolites that are specific to the tumor, a particular tissue or the gut of a mammal. In some embodiments, the promoter is directly or indirectly induced by a molecule that is co-administered with the bacterial cell.

### FNR Dependent Regulation

[0186] The recombinant bacteria comprise a gene or gene cassette for producing EGF, wherein the gene or gene cassette is operably linked to a directly or indirectly inducible promoter that is controlled by exogenous environmental condition(s). In some embodiments, the inducible promoter is an oxygen level-dependent promoter and EGF is expressed in low-oxygen, microaerobic, or anaerobic conditions. For example, in low oxygen conditions, the oxygen level-dependent promoter is activated by a corresponding oxygen level-sensing transcription factor, thereby driving production of EGF.

[0187] Bacteria have evolved transcription factors that are capable of sensing oxygen levels. Different signaling pathways may be triggered by different oxygen levels and occur with different kinetics. An oxygen level-dependent promoter is a nucleic acid sequence to which one or more oxygen level-sensing transcription factors is capable of binding, wherein the binding and/or activation of the corresponding transcription factor activates downstream gene expression. In one embodiment, the recombinant bacteria comprise a gene or gene cassette for producing a payload under the control of an oxygen level-dependent promoter. In a more specific aspect, the recombinant bacteria comprise a gene or gene cassette for producing a payload under the control of an oxygen level-dependent promoter that is activated under low-oxygen or anaerobic environments, such as the environment of the mammalian gut.

[0188] In certain embodiments, the bacterial cell comprises a gene encoding a payload expressed under the control of a fumarate and nitrate reductase regulator (FNR) responsive promoter. In E. coli, FNR is a major transcriptional activator that controls the switch from aerobic to anaerobic metabolism (Unden et al., 1997). In the anaerobic state, FNR dimerizes into an active DNA binding protein that activates hundreds of genes responsible for adapting to anaerobic growth. In the aerobic state, FNR is prevented from dimerizing by oxygen and is inactive. Exemplary FNR responsive promoters include, but are not limited to, SEQ ID NO: 151-167. FNR promoter sequences are known in the art, and any suitable FNR promoter sequence(s) may be used in the recombinant bacteria.

[0189] In some embodiments, the recombinant bacteria comprise one or more of: SEQ ID NOS: 151-157, nirB1 promoter (SEQ ID NO: 158), nirB2 promoter (SEQ ID NO: 159), nirB3 promoter (SEQ ID NO: 160), ydfZ promoter (SEQ ID NO: 161), nirB promoter fused to a strong ribosome binding site (SEQ ID NO: 162), ydfZ promoter fused to a strong ribosome binding site (SEQ ID NO: 163), fnrS, an anaerobically induced small RNA gene (fnrS1 promoter SEQ ID NO: 164 or fnrS2 promoter SEQ ID NO: 165), nirB promoter fused to a crp binding site (SEQ ID NO: 166), and fnrS fused to a crp binding site (SEQ ID NO: 167). In some embodiments, the FNR-responsive promoter is at least about 80%, 85%, 90%, 95%, or 99% homologous to the sequence of any one of SEQ ID NO: 151-167.

[0190] In some embodiments, multiple distinct FNR nucleic acid sequences are inserted in the recombinant bacteria. In alternate embodiments, the recombinant bacteria comprise a gene encoding a payload expressed under the control of an alternate oxygen level-dependent promoter, e.g., DNR (Trunk et al., 2010) or ANR (Ray et al., 1997). In these embodiments, expression of the payload gene is particularly activated in a low-oxygen or anaerobic environment, such as in the gut, e.g., a mammalian gut, e.g., a human gut. In some embodiments, gene expression is further optimized by methods known in the art, e.g., by optimizing ribosomal binding sites and/or increasing mRNA stability.

[0191] In another embodiment, the recombinant bacteria comprise a gene sequence encoding EGF, expressed under the control of anaerobic regulation of arginine deiminiase and nitrate reduction transcriptional regulator (ANR). In P. aeruginosa, ANR is “required for the expression of physiological functions which are inducible under oxygen-limiting or anaerobic conditions” (Winteler et al., 1996; Sawers 1991). P. aeruginosa ANR is homologous with E. coli FNR, and “the consensus FNR site (TTGAT----ATCAA) was recognized efficiently by ANR and FNR” (Winteler et al., 1996). Like FNR, in the anaerobic state, ANR activates numerous genes responsible for adapting to anaerobic growth. In the aerobic state, ANR is inactive. Pseudomonas fluorescens, Pseudomonas putida, Pseudomonas syringae, and Pseudomonas mendocina all have functional analogs of ANR (Zimmermann et al., 1991). Promoters that are regulated by ANR are known in the art, e.g., the promoter of the arcDABC operon (see, e.g., Hasegawa et al., 1998).

[0192] In other embodiments, the one or more gene sequence(s) for producing a payload are expressed under the control of an oxygen level-dependent promoter fused to a binding site for a transcriptional activator, e.g., CRP. CRP (cyclic AMP receptor protein or catabolite activator protein or CAP) plays a major regulatory role in bacteria by repressing genes responsible for the uptake, metabolism, and assimilation of less favorable carbon sources when rapidly metabolizable carbohydrates, such as glucose, are present (Wu et al., 2015). This preference for glucose has been termed glucose repression, as well as carbon catabolite repression (Deutscher, 2008; Gorke and Stnlke, 2008). In some embodiments, the gene or gene cassette for producing EGF is controlled by an oxygen level-dependent promoter fused to a CRP binding site. In some embodiments, the one or more gene sequence(s) for a payload are controlled by a FNR promoter fused to a CRP binding site. In these embodiments, cyclic AMP binds to CRP when no glucose is present in the environment. This binding causes a conformational change in CRP, and allows CRP to bind tightly to its binding site. CRP binding then activates transcription of the gene or gene cassette by recruiting RNA polymerase to the FNR promoter via direct protein-protein interactions. In the presence of glucose, cyclic AMP does not bind to CRP and transcription of the gene or gene cassette for producing an payload is repressed. In some embodiments, an oxygen level-dependent promoter (e.g., an FNR promoter) fused to a binding site for a transcriptional activator is used to ensure that the gene or gene cassette for producing a payload is not expressed under anaerobic conditions when sufficient amounts of glucose are present, e.g., by adding glucose to growth media in vitro.

[0193] In some embodiments, the recombinant bacteria comprise an oxygen level-dependent promoter from a different species, strain, or substrain of bacteria. In some embodiments, the recombinant bacteria comprise an oxygen level-sensing transcription factor, e.g., FNR, ANR or DNR, from a different species, strain, or substrain of bacteria. In some embodiments, the recombinant bacteria comprise an oxygen level-sensing transcription factor and corresponding promoter from a different species, strain, or substrain of bacteria. The heterologous oxygen-level dependent transcriptional regulator and/or promoter increases the transcription of genes operably linked to said promoter, e.g., one or more gene sequence(s) for producing the payload(s) in a low-oxygen or anaerobic environment, as compared to the native gene(s) and promoter in the bacteria under the same conditions. In certain embodiments, the non-native oxygen-level dependent transcriptional regulator is an FNR protein from N. gonorrhoeae (see, e.g., Isabella et al., 2011). In some embodiments, the corresponding wild-type transcriptional regulator is left intact and retains wild-type activity. In alternate embodiments, the corresponding wild-type transcriptional regulator is deleted or mutated to reduce or eliminate wild-type activity.

[0194] In some embodiments, the recombinant bacteria comprise a wild-type oxygen-level dependent transcriptional regulator, e.g., FNR, ANR, or DNR, and corresponding promoter that is mutated relative to the wild-type promoter from bacteria of the same subtype. The mutated promoter enhances binding to the wild-type transcriptional regulator and increases the transcription of genes operably linked to said promoter, e.g., the gene encoding the payload, in a low-oxygen or anaerobic environment, as compared to the wild-type promoter under the same conditions. In some embodiments, the recombinant bacteria comprise a wild-type oxygen-level dependent promoter, e.g., FNR, ANR, or DNR promoter, and corresponding transcriptional regulator that is mutated relative to the wild-type transcriptional regulator from bacteria of the same subtype. The mutated transcriptional regulator enhances binding to the wild-type promoter and increases the transcription of genes operably linked to said promoter, e.g., the gene encoding the payload, in a low-oxygen or anaerobic environment, as compared to the wild-type transcriptional regulator under the same conditions. In certain embodiments, the mutant oxygen-level dependent transcriptional regulator is an FNR protein comprising amino acid substitutions that enhance dimerization and FNR activity (see, e.g., Moore et al., (2006). In some embodiments, both the oxygen level-sensing transcriptional regulator and corresponding promoter are mutated relative to the wild-type sequences from bacteria of the same subtype in order to increase expression of the payload in low-oxygen conditions.

[0195] In some embodiments, the bacterial cells comprise multiple copies of the endogenous gene encoding the oxygen level-sensing transcriptional regulator, e.g., the FNR gene. In some embodiments, the gene encoding the oxygen level-sensing transcriptional regulator is present on a plasmid. In some embodiments, the gene encoding the oxygen level-sensing transcriptional regulator and the gene encoding the payload are present on different plasmids. In some embodiments, the gene encoding the oxygen level-sensing transcriptional regulator and the gene encoding the payload are present on the same plasmid.

[0196] In some embodiments, the gene encoding the oxygen level-sensing transcriptional regulator is present on a chromosome. In some embodiments, the gene encoding the oxygen level-sensing transcriptional regulator and the gene encoding the payload are present on different chromosomes. In some embodiments, the gene encoding the oxygen level-sensing transcriptional regulator and the gene encoding the payload are present on the same chromosome. In some instances, it may be advantageous to express the oxygen level-sensing transcriptional regulator under the control of an inducible promoter in order to enhance expression stability. In some embodiments, expression of the transcriptional regulator is controlled by a different promoter than the promoter that controls expression of the gene encoding the payload. In some embodiments, expression of the transcriptional regulator is controlled by the same promoter that controls expression of the payload. In some embodiments, the transcriptional regulator and the payload are divergently transcribed from a promoter region

### RNS-Dependent Regulation

[0197] In some embodiments, the recombinant bacteria comprise a gene encoding a payload that is expressed under the control of an inducible promoter. In some embodiments, the recombinant bacterium that expresses a payload under the control of a promoter that is activated by inflammatory conditions. In one embodiment, the gene for producing the payload is expressed under the control of an inflammatory-dependent promoter that is activated in inflammatory environments, e.g., a reactive nitrogen species or RNS promoter.

[0198] As used herein, “reactive nitrogen species” and “RNS” are used interchangeably to refer to highly active molecules, ions, and/or radicals derived from molecular nitrogen. RNS can cause deleterious cellular effects such as nitrosative stress. RNS includes, but is not limited to, nitric oxide (NO·), peroxynitrite or peroxynitrite anion (ONOO—), nitrogen dioxide (·NO₂), dinitrogen trioxide (N2O3), peroxynitrous acid (ONOOH), and nitroperoxycarbonate (ONOOCO2-) (unpaired electrons denoted by ·). Bacteria have evolved transcription factors that are capable of sensing RNS levels. Different RNS signaling pathways are triggered by different RNS levels and occur with different kinetics.

[0199] As used herein, “RNS-inducible regulatory region” refers to a nucleic acid sequence to which one or more RNS-sensing transcription factors is capable of binding, wherein the binding and/or activation of the corresponding transcription factor activates downstream gene expression; in the presence of RNS, the transcription factor binds to and/or activates the regulatory region. In some embodiments, the RNS-inducible regulatory region comprises a promoter sequence. In some embodiments, the transcription factor senses RNS and subsequently binds to the RNS-inducible regulatory region, thereby activating downstream gene expression. In alternate embodiments, the transcription factor is bound to the RNS-inducible regulatory region in the absence of RNS; in the presence of RNS, the transcription factor undergoes a conformational change, thereby activating downstream gene expression. The RNS-inducible regulatory region may be operatively linked to a gene or genes, e.g., a payload gene sequence(s), e.g., any of the payloads described herein. For example, in the presence of RNS, a transcription factor senses RNS and activates a corresponding RNS-inducible regulatory region, thereby driving expression of an operatively linked gene sequence. Thus, RNS induces expression of the gene or gene sequences.

[0200] Each regulatory region is capable of binding at least one corresponding RNS-sensing transcription factor. Examples of transcription factors that sense RNS and their corresponding RNS-responsive genes, promoters, and/or regulatory regions include, but are not limited to, those shown in Table 6.

TABLE 6
Examples of RNS-sensing transcription
factors and RNS-responsive genes

| RNS-sensing | Primarily | Examples of responsive |
|---|---|---|
| transcription | capable of | genes, promoters, and/ |
| factor: | sensing: | or regulatory regions: |
| NsrR | NO | norB, aniA, nsrR, hmpA, ytfE, |
| | | ygbA, hcp, hcr, nrfA, aox |
| NorR | NO | norVW, norR |
| DNR | NO | norCB, nir, nor, nos |

[0201] In some embodiments, the recombinant bacteria comprise a tunable regulatory region that is directly or indirectly controlled by a transcription factor that is capable of sensing at least one reactive nitrogen species. The tunable regulatory region is operatively linked to a gene or genes capable of directly or indirectly driving the expression of a payload, thus controlling expression of the payload relative to RNS levels. For example, the tunable regulatory region is a RNS-inducible regulatory region, and the payload is a payload, such as any of the payloads provided herein; when RNS is present, e.g., in an inflamed tissue, a RNS-sensing transcription factor binds to and/or activates the regulatory region and drives expression of the payload gene or genes. Subsequently, when inflammation is ameliorated, RNS levels are reduced, and production of the payload is decreased or eliminated.

[0202] In some embodiments, the tunable regulatory region is a RNS-inducible regulatory region; in the presence of RNS, a transcription factor senses RNS and activates the RNS-inducible regulatory region, thereby driving expression of an operatively linked gene or genes. In some embodiments, the transcription factor senses RNS and subsequently binds to the RNS-inducible regulatory region, thereby activating downstream gene expression. In alternate embodiments, the transcription factor is bound to the RNS-inducible regulatory region in the absence of RNS; when the transcription factor senses RNS, it undergoes a conformational change, thereby inducing downstream gene expression.

[0203] In some embodiments, the tunable regulatory region is a RNS-inducible regulatory region, and the transcription factor that senses RNS is NorR. NorR “is an NO-responsive transcriptional activator that regulates expression of the norVW genes encoding flavorubredoxin and an associated flavoprotein, which reduce NO to nitrous oxide” (Spiro 2006). The recombinant bacteria may comprise any suitable RNS-responsive regulatory region from a gene that is activated by NorR. Genes that are capable of being activated by NorR are known in the art (see, e.g., Spiro 2006; Vine et al., 2011; Karlinsey et al., 2012). In certain embodiments, the recombinant bacteria comprise a RNS-inducible regulatory region from norVW that is operatively linked to a gene or genes, e.g., one or more payload gene sequence(s). In the presence of RNS, a NorR transcription factor senses RNS and activates to the norVW regulatory region, thereby driving expression of the operatively linked gene(s) and producing the payload(s).

[0204] In some embodiments, the tunable regulatory region is a RNS-inducible regulatory region, and the transcription factor that senses RNS is DNR. DNR (dissimilatory nitrate respiration regulator) “promotes the expression of the nir, the nor and the nos genes” in the presence of nitric oxide (Castiglione et al., 2009). The recombinant bacteria may comprise any suitable RNS-responsive regulatory region from a gene that is activated by DNR. Genes that are capable of being activated by DNR are known in the art (see, e.g., Castiglione et al., 2009; Giardina et al., 2008). In certain embodiments, the recombinant bacteria comprise a RNS-inducible regulatory region from norCB that is operatively linked to a gene or gene cassette, e.g., a butyrogenic gene cassette. In the presence of RNS, a DNR transcription factor senses RNS and activates to the norCB regulatory region, thereby driving expression of the operatively linked gene or genes and producing one or more payloads. In some embodiments, the DNR is Pseudomonas aeruginosa DNR. Any suitable transcriptional regulator that is controlled by exogenous environmental conditions and corresponding regulatory region may be used. Non-limiting examples include ArcA/B, ResD/E, NreA/B/C, and AirSR, and others are known in the art.

[0205] In some embodiments, the tunable regulatory region is a RNS-derepressible regulatory region, and binding of a corresponding transcription factor represses downstream gene expression; in the presence of RNS, the transcription factor no longer binds to the regulatory region, thereby derepressing the operatively linked gene or gene cassette.

[0206] In some embodiments, the tunable regulatory region is a RNS-derepressible regulatory region, and the transcription factor that senses RNS is NsrR. NsrR is “an Rrf2-type transcriptional repressor [that] can sense NO and control the expression of genes responsible for NO metabolism” (Isabella et al., 2009). The recombinant bacteria may comprise any suitable RNS-responsive regulatory region from a gene that is repressed by NsrR. In some embodiments, the NsrR is Neisseria gonorrhoeae NsrR. Genes that are capable of being repressed by NsrR are known in the art (see, e.g., Isabella et al., 2009; Dunn et al., 2010). In certain embodiments, the recombinant bacteria comprise a RNS-derepressible regulatory region from norB that is operatively linked to a gene or genes, e.g., a payload gene or genes. In the presence of RNS, an NsrR transcription factor senses RNS and no longer binds to the norB regulatory region, thereby derepressing the operatively linked a payload gene or genes and producing the encoding a payload(s).

[0207] In some embodiments, it is advantageous for the recombinant bacteria to express a RNS-sensing transcription factor that does not regulate the expression of a significant number of native genes in the bacteria. In some embodiments, the recombinant bacterium expresses a RNS-sensing transcription factor from a different species, strain, or substrain of bacteria, wherein the transcription factor does not bind to regulatory sequences in the recombinant bacterium. In some embodiments, the recombinant bacterium is Escherichia coli, and the RNS-sensing transcription factor is NsrR, e.g., from is Neisseria gonorrhoeae, wherein the Escherichia coli does not comprise binding sites for said NsrR. In some embodiments, the heterologous transcription factor minimizes or eliminates off-target effects on endogenous regulatory regions and genes in the recombinant bacteria.

[0208] In these embodiments, the recombinant bacteria may comprise a two-repressor activation regulatory circuit, which is used to express a payload. The two-repressor activation regulatory circuit comprises a first RNS-sensing repressor and a second repressor, which is operatively linked to a gene or gene cassette, e.g., encoding a payload. In one aspect of these embodiments, the RNS-sensing repressor inhibits transcription of the second repressor, which inhibits the transcription of the gene or gene cassette. Examples of second repressors useful in these embodiments, include, but are not limited to, TetR, C1, and LexA. In the absence of binding by the first repressor (which occurs in the absence of RNS), the second repressor is transcribed, which represses expression of the gene or genes. In the presence of binding by the first repressor (which occurs in the presence of RNS), expression of the second repressor is repressed, and the gene or genes, e.g., a payload gene or genes is expressed.

[0209] A RNS-responsive transcription factor may induce, derepress, or repress gene expression depending upon the regulatory region sequence used in the recombinant bacteria. One or more types of RNS-sensing transcription factors and corresponding regulatory region sequences may be present in recombinant bacteria. In some embodiments, the recombinant bacteria comprise one type of RNS-sensing transcription factor, e.g., NsrR, and one corresponding regulatory region sequence, e.g., from norB. In some embodiments, the recombinant bacteria comprise one type of RNS-sensing transcription factor, e.g., NsrR, and two or more different corresponding regulatory region sequences, e.g., from norB and aniA. In some embodiments, the recombinant bacteria comprise two or more types of RNS-sensing transcription factors, e.g., NsrR and NorR, and two or more corresponding regulatory region sequences, e.g., from norB and norR, respectively. One RNS-responsive regulatory region may be capable of binding more than one transcription factor. In some embodiments, the recombinant bacteria comprise two or more types of RNS-sensing transcription factors and one corresponding regulatory region sequence. Nucleic acid sequences of several RNS-regulated regulatory regions are known in the art (see, e.g., Spiro 2006; Isabella et al., 2009; Dunn et al., 2010; Vine et al., 2011; Karlinsey et al., 2012).

[0210] In some embodiments, the recombinant bacteria comprise a gene encoding a RNS-sensing transcription factor, e.g., the nsrR gene, that is controlled by its native promoter, an inducible promoter, a promoter that is stronger than the native promoter, e.g., the GlnRS promoter or the P(Bla) promoter, or a constitutive promoter. In some instances, it may be advantageous to express the RNS-sensing transcription factor under the control of an inducible promoter in order to enhance expression stability. In some embodiments, expression of the RNS-sensing transcription factor is controlled by a different promoter than the promoter that controls expression of EGF. In some embodiments, expression of the RNS-sensing transcription factor is controlled by the same promoter that controls expression of EGF. In some embodiments, the RNS-sensing transcription factor and EGF are divergently transcribed from a promoter region.

[0211] In some embodiments, the recombinant bacteria comprise a gene for a RNS-sensing transcription factor from a different species, strain, or substrain of bacteria. In some embodiments, the recombinant bacteria comprise a RNS-responsive regulatory region from a different species, strain, or substrain of bacteria. In some embodiments, the recombinant bacteria comprise a RNS-sensing transcription factor and corresponding RNS-responsive regulatory region from a different species, strain, or substrain of bacteria. The heterologous RNS-sensing transcription factor and regulatory region may increase the transcription of genes operatively linked to said regulatory region in the presence of RNS, as compared to the native transcription factor and regulatory region from bacteria of the same subtype under the same conditions.

[0212] In some embodiments, the recombinant bacteria comprise a RNS-sensing transcription factor, NsrR, and corresponding regulatory region, nsrR, from Neisseria gonorrhoeae. In some embodiments, the native RNS-sensing transcription factor, e.g., NsrR, is left intact and retains wild-type activity. In alternate embodiments, the native RNS-sensing transcription factor, e.g., NsrR, is deleted or mutated to reduce or eliminate wild-type activity.

[0213] In some embodiments, the recombinant bacteria comprise multiple copies of the endogenous gene encoding the RNS-sensing transcription factor, e.g., the nsrR gene. In some embodiments, the gene encoding the RNS-sensing transcription factor is present on a plasmid. In some embodiments, the gene encoding the RNS-sensing transcription factor and the gene or gene cassette for producing EGF are present on different plasmids. In some embodiments, the gene encoding the RNS-sensing transcription factor and the gene or gene cassette for producing EGF are present on the same plasmid. In some embodiments, the gene encoding the RNS-sensing transcription factor is present on a chromosome. In some embodiments, the gene encoding the RNS-sensing transcription factor and the gene or gene cassette for producing EGF are present on different chromosomes. In some embodiments, the gene encoding the RNS-sensing transcription factor and the gene or gene cassette for producing EGF are present on the same chromosome.

[0214] In some embodiments, the recombinant bacteria comprise a wild-type gene encoding a RNS-sensing transcription factor, e.g., the NsrR gene, and a corresponding regulatory region, e.g., a norB regulatory region, that is mutated relative to the wild-type regulatory region from bacteria of the same subtype. The mutated regulatory region increases the expression of the payload in the presence of RNS, as compared to the wild-type regulatory region under the same conditions. In some embodiments, the recombinant bacteria comprise a wild-type RNS-responsive regulatory region, e.g., the norB regulatory region, and a corresponding transcription factor, e.g., NsrR, that is mutated relative to the wild-type transcription factor from bacteria of the same subtype. The mutant transcription factor increases the expression of the payload in the presence of RNS, as compared to the wild-type transcription factor under the same conditions. In some embodiments, both the RNS-sensing transcription factor and corresponding regulatory region are mutated relative to the wild-type sequences from bacteria of the same subtype in order to increase expression of the payload in the presence of RNS.

[0215] In some embodiments, the gene or gene cassette for producing the e molecule(s) is present on a plasmid and operably linked to a promoter that is induced by RNS. In some embodiments, expression is further optimized by methods known in the art, e.g., by optimizing ribosomal binding sites, manipulating transcriptional regulators, and/or increasing mRNA stability.

[0216] In some embodiments, any of the gene(s) of the present disclosure may be integrated into the bacterial chromosome at one or more integration sites. For example, one or more copies of one or more encoding a payload gene(s) may be integrated into the bacterial chromosome. Having multiple copies of the gene or gen(s) integrated into the chromosome allows for greater production of the payload(s) and also permits fine-tuning of the level of expression. Alternatively, different circuits described herein, such as any of the secretion or exporter circuits, in addition to the EGF gene(s) or gene cassette(s) could be integrated into the bacterial chromosome at one or more different integration sites to perform multiple different functions.

[0217] In some embodiments, the recombinant bacteria produce at least one payload in the presence of RNS to reduce local gut inflammation by at least about 1.5-fold, at least about 2-fold, at least about 10-fold, at least about 15-fold, at least about 20-fold, at least about 30-fold, at least about 50-fold, at least about 100-fold, at least about 200-fold, at least about 300-fold, at least about 400-fold, at least about 500-fold, at least about 600-fold, at least about 700-fold, at least about 800-fold, at least about 900-fold, at least about 1,000-fold, or at least about 1,500-fold as compared to unmodified bacteria of the same subtype under the same conditions. Inflammation may be measured by methods known in the art, e.g., counting disease lesions using endoscopy; detecting T regulatory cell differentiation in peripheral blood, e.g., by fluorescence activated sorting; measuring T regulatory cell levels; measuring cytokine levels; measuring areas of mucosal damage; assaying inflammatory biomarkers, e.g., by qPCR; PCR arrays; transcription factor phosphorylation assays; immunoassays; and/or cytokine assay kits (Mesoscale, Cayman Chemical, Qiagen).

[0218] In some embodiments, the recombinant bacteria produce at least about 1.5-fold, at least about 2-fold, at least about 10-fold, at least about 15-fold, at least about 20-fold, at least about 30-fold, at least about 50-fold, at least about 100-fold, at least about 200-fold, at least about 300-fold, at least about 400-fold, at least about 500-fold, at least about 600-fold, at least about 700-fold, at least about 800-fold, at least about 900-fold, at least about 1,000-fold, or at least about 1,500-fold more of payload in the presence of RNS than unmodified bacteria of the same subtype under the same conditions. Certain unmodified bacteria will not have detectable levels of the payload. In embodiments using genetically modified forms of these bacteria, payload will be detectable in the presence of RNS.

### ROS-Dependent Regulation

[0219] In some embodiments, the recombinant bacteria comprise a gene for producing a payload that is expressed under the control of an inducible promoter. In some embodiments, the recombinant bacterium that expresses a payload under the control of a promoter that is activated by conditions of cellular damage. In one embodiment, the gene for producing the payload is expressed under the control of a cellular damaged-dependent promoter that is activated in environments in which there is cellular or tissue damage, e.g., a reactive oxygen species or ROS promoter.

[0220] As used herein, “reactive oxygen species” and “ROS” are used interchangeably to refer to highly active molecules, ions, and/or radicals derived from molecular oxygen. ROS can be produced as byproducts of aerobic respiration or metal-catalyzed oxidation and may cause deleterious cellular effects such as oxidative damage. ROS includes, but is not limited to, hydrogen peroxide (H₂O₂), organic peroxide (ROOH), hydroxyl ion (OH—), hydroxyl radical (·OH), superoxide or superoxide anion (·O2-), singlet oxygen (IO2), ozone (O3), carbonate radical, peroxide or peroxyl radical (·O2-2), hypochlorous acid (HOCl), hypochlorite ion (OCl—), sodium hypochlorite (NaOCl), nitric oxide (NO·), and peroxynitrite or peroxynitrite anion (ONOO—) (unpaired electrons denoted by ·). Bacteria have evolved transcription factors that are capable of sensing ROS levels. Different ROS signaling pathways are triggered by different ROS levels and occur with different kinetics (Marinho et al., 2014).

[0221] As used herein, “ROS-inducible regulatory region” refers to a nucleic acid sequence to which one or more ROS-sensing transcription factors is capable of binding, wherein the binding and/or activation of the corresponding transcription factor activates downstream gene expression; in the presence of ROS, the transcription factor binds to and/or activates the regulatory region. In some embodiments, the ROS-inducible regulatory region comprises a promoter sequence. In some embodiments, the transcription factor senses ROS and subsequently binds to the ROS-inducible regulatory region, thereby activating downstream gene expression. In alternate embodiments, the transcription factor is bound to the ROS-inducible regulatory region in the absence of ROS; in the presence of ROS, the transcription factor undergoes a conformational change, thereby activating downstream gene expression. The ROS-inducible regulatory region may be operatively linked to a gene sequence or gene sequence, e.g., a sequence or sequences encoding one or more payload(s). For example, in the presence of ROS, a transcription factor, e.g., OxyR, senses ROS and activates a corresponding ROS-inducible regulatory region, thereby driving expression of an operatively linked gene sequence or gene sequences. Thus, ROS induces expression of the gene or genes. Alternatively, in the presence of ROS, a transcription factor, e.g., PerR, senses ROS and binds to a corresponding ROS-repressible regulatory region, thereby blocking expression of an operatively linked gene sequence or gene sequences. Thus, ROS represses expression of the gene or genes.

[0222] Each regulatory region is capable of binding at least one corresponding ROS-sensing transcription factor. Examples of transcription factors that sense ROS and their corresponding ROS-responsive genes, promoters, and/or regulatory regions include, but are not limited to, those shown in Table 7.

TABLE 7
Examples of ROS-sensing transcription
factors and ROS-responsive genes

| ROS-sensing | Primarily | Examples of responsive |
|---|---|---|
| transcription | capable of | genes, promoters, and/ |
| factor: | sensing: | or regulatory regions: |
| OxyR | H₂O₂ | ahpC; ahpF; dps; dsbG; fhuF; |
| | | flu; fur; gor; grxA; hemH; katG; |
| | | oxyS; sufA; sufB; sufC; sufD; |
| | | sufE; sufS; trxC; uxuA; yaaA; |
| | | yaeH; yaiA; ybjM; ydcH; ydeN; |
| | | ygaQ; yljA; ytfK |
| PerR | H₂O₂ | katA; ahpCF; mrgA; zoaA; fur; |
| | | hemAXCDBL; srfA |
| OhrR | Organic peroxides | ohrA |
| | NaOCl | |
| SoxR | •O₂⁻ | soxS |
| | NO• | |
| | (also capable of | |
| | sensing H₂O₂) | |
| RosR | H₂O₂ | rbtT; tnp16a; rluC1; tnp5a; mscL; |
| | | tnp2d; phoD; tnp15b; pstA; tnp5b; |
| | | xylC; gabD1; rluC2; cgtS9; azlC; |
| | | narKGHJI; rosR |

[0223] In some embodiments, the recombinant bacteria comprise a tunable regulatory region that is directly or indirectly controlled by a transcription factor that is capable of sensing at least one reactive oxygen species. The tunable regulatory region is operatively linked to a gene or gene cassette capable of directly or indirectly driving the expression of a payload, thus controlling expression of the payload relative to ROS levels. For example, the tunable regulatory region is a ROS-inducible regulatory region, and the molecule is a payload; when ROS is present, e.g., in an inflamed tissue, a ROS-sensing transcription factor binds to and/or activates the regulatory region and drives expression of the gene sequence for the payload, thereby producing the payload. Subsequently, when inflammation is ameliorated, ROS levels are reduced, and production of the payload is decreased or eliminated.

[0224] In some embodiments, the tunable regulatory region is a ROS-inducible regulatory region; in the presence of ROS, a transcription factor senses ROS and activates the ROS-inducible regulatory region, thereby driving expression of an operatively linked gene or gene cassette. In some embodiments, the transcription factor senses ROS and subsequently binds to the ROS-inducible regulatory region, thereby activating downstream gene expression. In alternate embodiments, the transcription factor is bound to the ROS-inducible regulatory region in the absence of ROS; when the transcription factor senses ROS, it undergoes a conformational change, thereby inducing downstream gene expression.

[0225] In some embodiments, the tunable regulatory region is a ROS-inducible regulatory region, and the transcription factor that senses ROS is OxyR. OxyR “functions primarily as a global regulator of the peroxide stress response” and is capable of regulating dozens of genes, e.g., “genes involved in H₂O₂ detoxification (katE, ahpCF), heme biosynthesis (hemH), reductant supply (grxA, gor, trxC), thiol-disulfide isomerization (dsbG), Fe—S center repair (sufA-E, sufS), iron binding (yaaA), repression of iron import systems (fur)” and “OxyS, a small regulatory RNA” (Dubbs et al., 2012). The recombinant bacteria may comprise any suitable ROS-responsive regulatory region from a gene that is activated by OxyR. Genes that are capable of being activated by OxyR are known in the art (see, e.g., Zheng et al., 2001; Dubbs et al., 2012). In certain embodiments, the recombinant bacteria comprise a ROS-inducible regulatory region from oxyS that is operatively linked to a gene, e.g., a payload gene. In the presence of ROS, e.g., H2O2, an OxyR transcription factor senses ROS and activates to the oxyS regulatory region, thereby driving expression of the operatively linked payload gene and producing the payload. In some embodiments, OxyR is encoded by an E. coli oxyR gene. In some embodiments, the oxyS regulatory region is an E. coli oxyS regulatory region. In some embodiments, the ROS-inducible regulatory region is selected from the regulatory region of katG, dps, and ahpC.

[0226] In alternate embodiments, the tunable regulatory region is a ROS-inducible regulatory region, and the corresponding transcription factor that senses ROS is SoxR. When SoxR is “activated by oxidation of its [2Fe-2S] cluster, it increases the synthesis of SoxS, which then activates its target gene expression” (Koo et al., 2003). “SoxR is known to respond primarily to superoxide and nitric oxide” (Koo et al., 2003), and is also capable of responding to H2O2. The recombinant bacteria may comprise any suitable ROS-responsive regulatory region from a gene that is activated by SoxR. Genes that are capable of being activated by SoxR are known in the art (see, e.g., Koo et al., 2003). In certain embodiments, the recombinant bacteria comprise a ROS-inducible regulatory region from soxS that is operatively linked to a gene, e.g., a payload. In the presence of ROS, the SoxR transcription factor senses ROS and activates the soxS regulatory region, thereby driving expression of the operatively linked a payload gene and producing the payload.

[0227] In some embodiments, the tunable regulatory region is a ROS-derepressible regulatory region, and binding of a corresponding transcription factor represses downstream gene expression; in the presence of ROS, the transcription factor no longer binds to the regulatory region, thereby derepressing the operatively linked gene or gene cassette.

[0228] In some embodiments, the tunable regulatory region is a ROS-derepressible regulatory region, and the transcription factor that senses ROS is OhrR. OhrR “binds to a pair of inverted repeat DNA sequences overlapping the ohrA promoter site and thereby represses the transcription event,” but oxidized OhrR is “unable to bind its DNA target” (Duarte et al., 2010). OhrR is a “transcriptional repressor [that] . . . senses both organic peroxides and NaOCl” (Dubbs et al., 2012) and is “weakly activated by H2O2 but it shows much higher reactivity for organic hydroperoxides” (Duarte et al., 2010). The recombinant bacteria may comprise any suitable ROS-responsive regulatory region from a gene that is repressed by OhrR. Genes that are capable of being repressed by OhrR are known in the art (see, e.g., Dubbs et al., 2012). In certain embodiments, the recombinant bacteria comprise a ROS-derepressible regulatory region from ohrA that is operatively linked to a gene or gene cassette, e.g., a payload gene. In the presence of ROS, e.g., NaOCl, an OhrR transcription factor senses ROS and no longer binds to the ohrA regulatory region, thereby derepressing the operatively linked payload gene and producing the payload.

[0229] OhrR is a member of the MarR family of ROS-responsive regulators. “Most members of the MarR family are transcriptional repressors and often bind to the −10 or −35 region in the promoter causing a steric inhibition of RNA polymerase binding” (Bussmann et al., 2010). Other members of this family are known in the art and include, but are not limited to, OspR, MgrA, RosR, and SarZ. In some embodiments, the transcription factor that senses ROS is OspR, MgRA, RosR, and/or SarZ, and the recombinant bacteria comprises one or more corresponding regulatory region sequences from a gene that is repressed by OspR, MgRA, RosR, and/or SarZ. Genes that are capable of being repressed by OspR, MgRA, RosR, and/or SarZ are known in the art (see, e.g., Dubbs et al., 2012).

[0230] In some embodiments, the tunable regulatory region is a ROS-derepressible regulatory region, and the corresponding transcription factor that senses ROS is RosR. RosR is “a MarR-type transcriptional regulator” that binds to an “18-bp inverted repeat with the consensus sequence TTGTTGAYRYRTCAACWA (SEQ ID NO: 1085)” and is “reversibly inhibited by the oxidant H2O2” (Bussmann et al., 2010). RosR is capable of repressing numerous genes and putative genes, including but not limited to “a putative polyisoprenoid-binding protein (cg1322, gene upstream of and divergent from rosR), a sensory histidine kinase (cgtS9), a putative transcriptional regulator of the Crp/FNR family (cg3291), a protein of the glutathione S-transferase family (cg1426), two putative FMN reductases (cg1150 and cg1850), and four putative monooxygenases (cg0823, cg1848, cg2329, and cg3084)” (Bussmann et al., 2010). The recombinant bacteria may comprise any suitable ROS-responsive regulatory region from a gene that is repressed by RosR. Genes that are capable of being repressed by RosR are known in the art (see, e.g., Bussmann et al., 2010). In certain embodiments, the recombinant bacteria comprise a ROS-derepressible regulatory region from cgtS9 that is operatively linked to a gene or gene cassette, e.g., a payload. In the presence of ROS, e.g., H2O2, a RosR transcription factor senses ROS and no longer binds to the cgtS9 regulatory region, thereby derepressing the operatively linked payload gene and producing the payload.

[0231] In some embodiments, it is advantageous for the recombinant bacteria to express a ROS-sensing transcription factor that does not regulate the expression of a significant number of native genes in the bacteria. In some embodiments, the recombinant bacterium expresses a ROS-sensing transcription factor from a different species, strain, or substrain of bacteria, wherein the transcription factor does not bind to regulatory sequences in the recombinant bacterium. In some embodiments, the recombinant bacterium is Escherichia coli, and the ROS-sensing transcription factor is RosR, e.g., from Corynebacterium glutamicum, wherein the Escherichia coli does not comprise binding sites for said RosR. In some embodiments, the heterologous transcription factor minimizes or eliminates off-target effects on endogenous regulatory regions and genes in the recombinant bacteria.

[0232] In some embodiments, the tunable regulatory region is a ROS-repressible regulatory region, and the transcription factor that senses ROS is PerR. In Bacillus subtilis, PerR “when bound to DNA, represses the genes coding for proteins involved in the oxidative stress response (katA, ahpC, and mrgA), metal homeostasis (hemAXCDBL, fur, and zoaA) and its own synthesis (perR)” (Marinho et al., 2014). PerR is a “global regulator that responds primarily to H2O2” (Dubbs et al., 2012) and “interacts with DNA at the per box, a specific palindromic consensus sequence (TTATAATNATTATAA (SEQ ID NO: 1086)) residing within and near the promoter sequences of PerR-controlled genes” (Marinho et al., 2014). PerR is capable of binding a regulatory region that “overlaps part of the promoter or is immediately downstream from it” (Dubbs et al., 2012). The recombinant bacteria may comprise any suitable ROS-responsive regulatory region from a gene that is repressed by PerR. Genes that are capable of being repressed by PerR are known in the art (see, e.g., Dubbs et al., 2012).

[0233] In these embodiments, the recombinant bacteria may comprise a two-repressor activation regulatory circuit, which is used to express a payload. The two-repressor activation regulatory circuit comprises a first ROS-sensing repressor, e.g., PerR, and a second repressor, e.g., TetR, which is operatively linked to a gene or gene cassette, e.g., a payload. In one aspect of these embodiments, the ROS-sensing repressor inhibits transcription of the second repressor, which inhibits the transcription of the gene or gene cassette. Examples of second repressors useful in these embodiments include, but are not limited to, TetR, C1, and LexA. In some embodiments, the ROS-sensing repressor is PerR. In some embodiments, the second repressor is TetR. In this embodiment, a PerR-repressible regulatory region drives expression of TetR, and a TetR-repressible regulatory region drives expression of the gene or gene cassette, e.g., a payload. In the absence of PerR binding (which occurs in the absence of ROS), tetR is transcribed, and TetR represses expression of the gene or gene cassette, e.g., a payload. In the presence of PerR binding (which occurs in the presence of ROS), tetR expression is repressed, and the gene or gene cassette, e.g., a payload, is expressed.

[0234] A ROS-responsive transcription factor may induce, derepress, or repress gene expression depending upon the regulatory region sequence used in the recombinant bacteria. For example, although “OxyR is primarily thought of as a transcriptional activator under oxidizing conditions. OxyR can function as either a repressor or activator under both oxidizing and reducing conditions” (Dubbs et al., 2012), and OxyR “has been shown to be a repressor of its own expression as well as that of fhuF (encoding a ferric ion reductase) and flu (encoding the antigen 43 outer membrane protein)” (Zheng et al., 2001). The recombinant bacteria may comprise any suitable ROS-responsive regulatory region from a gene that is repressed by OxyR. In some embodiments, OxyR is used in a two-repressor activation regulatory circuit, as described above. Genes that are capable of being repressed by OxyR are known in the art (see, e.g., Zheng et al., 2001). Or, for example, although RosR is capable of repressing a number of genes, it is also capable of activating certain genes, e.g., the narKGHJI operon. In some embodiments, the recombinant bacteria comprise any suitable ROS-responsive regulatory region from a gene that is activated by RosR. In some embodiments, the recombinant bacteria comprise any suitable ROS-responsive regulatory region from a gene that is activated by PerR.

[0235] One or more types of ROS-sensing transcription factors and corresponding regulatory region sequences may be present in recombinant bacteria. For example, “OhrR is found in both Gram-positive and Gram-negative bacteria and can coreside with either OxyR or PerR or both” (Dubbs et al., 2012). In some embodiments, the recombinant bacteria comprise one type of ROS-sensing transcription factor, e.g., OxyR, and one corresponding regulatory region sequence, e.g., from oxyS. In some embodiments, the recombinant bacteria comprise one type of ROS-sensing transcription factor, e.g., OxyR, and two or more different corresponding regulatory region sequences, e.g., from oxyS and katG. In some embodiments, the recombinant bacteria comprise two or more types of ROS-sensing transcription factors, e.g., OxyR and PerR, and two or more corresponding regulatory region sequences, e.g., from oxyS and katA, respectively. One ROS-responsive regulatory region may be capable of binding more than one transcription factor. In some embodiments, the recombinant bacteria comprise two or more types of ROS-sensing transcription factors and one corresponding regulatory region sequence.

[0236] In some embodiments, recombinant bacteria comprise nucleic acid sequences comprising OxyR binding sites. In some embodiments, recombinant bacteria comprise a nucleic acid sequence that is at least about 80%, 85%, 90%, 95%, or 99% homologous to the DNA sequence of SEQ ID NO: 168, SEQ ID NO: 169, or SEQ ID NO: 170, or SEQ ID NO: 171, or a functional fragment thereof. In some embodiments, the regulatory region sequence is at least about 80%, 85%, 90%, 95%, or 99% homologous to the sequence of SEQ ID NO: 168, SEQ ID NO: 169, SEQ ID NO: 170, and/or SEQ ID NO: 171.

[0237] In some embodiments, the recombinant bacteria comprise a gene encoding a ROS-sensing transcription factor, e.g., the oxyR gene, that is controlled by its native promoter, an inducible promoter, a promoter that is stronger than the native promoter, e.g., the GlnRS promoter or the P(Bla) promoter, or a constitutive promoter. In some instances, it may be advantageous to express the ROS-sensing transcription factor under the control of an inducible promoter in order to enhance expression stability. In some embodiments, expression of the ROS-sensing transcription factor is controlled by a different promoter than the promoter that controls expression of EGF. In some embodiments, expression of the ROS-sensing transcription factor is controlled by the same promoter that controls expression of EGF. In some embodiments, the ROS-sensing transcription factor and EGF are divergently transcribed from a promoter region.

[0238] In some embodiments, the recombinant bacteria comprise a gene for a ROS-sensing transcription factor from a different species, strain, or substrain of bacteria. In some embodiments, the recombinant bacteria comprise a ROS-responsive regulatory region from a different species, strain, or substrain of bacteria. In some embodiments, the recombinant bacteria comprise a ROS-sensing transcription factor and corresponding ROS-responsive regulatory region from a different species, strain, or substrain of bacteria. The heterologous ROS-sensing transcription factor and regulatory region may increase the transcription of genes operatively linked to said regulatory region in the presence of ROS, as compared to the native transcription factor and regulatory region from bacteria of the same subtype under the same conditions.

[0239] In some embodiments, the recombinant bacteria comprise a ROS-sensing transcription factor, OxyR, and corresponding regulatory region, oxyS, from Escherichia coli. In some embodiments, the native ROS-sensing transcription factor, e.g., OxyR, is left intact and retains wild-type activity. In alternate embodiments, the native ROS-sensing transcription factor, e.g., OxyR, is deleted or mutated to reduce or eliminate wild-type activity.

[0240] In some embodiments, the recombinant bacteria comprise multiple copies of the endogenous gene encoding the ROS-sensing transcription factor, e.g., the oxyR gene. In some embodiments, the gene encoding the ROS-sensing transcription factor is present on a plasmid. In some embodiments, the gene encoding the ROS-sensing transcription factor and the gene or gene cassette for producing EGF are present on different plasmids. In some embodiments, the gene encoding the ROS-sensing transcription factor and the gene or gene cassette for producing EGF are present on the same plasmid. In some embodiments, the gene encoding the ROS-sensing transcription factor is present on a chromosome. In some embodiments, the gene encoding the ROS-sensing transcription factor and the gene or gene cassette for producing EGF are present on different chromosomes. In some embodiments, the gene encoding the ROS-sensing transcription factor and the gene or gene cassette for producing EGF are present on the same chromosome.

[0241] In some embodiments, the recombinant bacteria comprise a wild-type gene encoding a ROS-sensing transcription factor, e.g., the soxR gene, and a corresponding regulatory region, e.g., a soxS regulatory region, that is mutated relative to the wild-type regulatory region from bacteria of the same subtype. The mutated regulatory region increases the expression of the payload in the presence of ROS, as compared to the wild-type regulatory region under the same conditions. In some embodiments, the recombinant bacteria comprise a wild-type ROS-responsive regulatory region, e.g., the oxyS regulatory region, and a corresponding transcription factor, e.g., OxyR, that is mutated relative to the wild-type transcription factor from bacteria of the same subtype. The mutant transcription factor increases the expression of the payload in the presence of ROS, as compared to the wild-type transcription factor under the same conditions. In some embodiments, both the ROS-sensing transcription factor and corresponding regulatory region are mutated relative to the wild-type sequences from bacteria of the same subtype in order to increase expression of the payload in the presence of ROS.

[0242] In some embodiments, the gene or gene cassette for producing the payload is present on a plasmid and operably linked to a promoter that is induced by ROS. In some embodiments, the gene or gene cassette for producing the payload is present in the chromosome and operably linked to a promoter that is induced by ROS. In some embodiments, the gene or gene cassette for producing the payload is present on a chromosome and operably linked to a promoter that is induced by exposure to tetracycline. In some embodiments, the gene or gene cassette for producing the payload is present on a plasmid and operably linked to a promoter that is induced by exposure to tetracycline. In some embodiments, expression is further optimized by methods known in the art, e.g., by optimizing ribosomal binding sites, manipulating transcriptional regulators, and/or increasing mRNA stability.

[0243] In some embodiments, the recombinant bacteria may comprise multiple copies of the gene(s) capable of producing a payload(s). In some embodiments, the gene(s) capable of producing a payload(s) is present on a plasmid and operatively linked to a ROS-responsive regulatory region. In some embodiments, the gene(s) capable of producing a payload is present in a chromosome and operatively linked to a ROS-responsive regulatory region.

[0244] Thus, in some embodiments, the recombinant bacteria produce one or more payloads under the control of an oxygen level-dependent promoter, a reactive oxygen species (ROS)-dependent promoter, or a reactive nitrogen species (RNS)-dependent promoter, and a corresponding transcription factor.

[0245] In some embodiments, the recombinant bacteria comprise a stably maintained plasmid or chromosome carrying a gene for producing a payload, such that the payload can be expressed in the host cell, and the host cell is capable of survival and/or growth in vitro, e.g., in medium, and/or in vivo. In some embodiments, a bacterium may comprise multiple copies of the gene encoding the payload. In some embodiments, the gene encoding the payload is expressed on a low-copy plasmid. In some embodiments, the low-copy plasmid may be useful for increasing stability of expression. In some embodiments, the low-copy plasmid may be useful for decreasing leaky expression under non-inducing conditions. In some embodiments, the gene encoding the payload is expressed on a high-copy plasmid. In some embodiments, the high-copy plasmid may be useful for increasing expression of the payload. In some embodiments, the gene encoding the payload is expressed on a chromosome.

### Propionate and Other Promoters

[0246] In some embodiments, the recombinant bacteria comprise the gene or gene cassette for producing EGF polypeptides, expressed under the control of an inducible promoter that is responsive to specific molecules or metabolites in the environment, e.g., the tumor microenvironment, a specific tissue, or the mammalian gut. For example, the short-chain fatty acid propionate is a major microbial fermentation metabolite localized to the gut (Hosseini et al., 2011). In one embodiment, the gene or gene cassette for producing EGF is under the control of a propionate-inducible promoter. In a more specific embodiment, the gene or gene cassette for producing EGF is under the control of a propionate-inducible promoter that is activated by the presence of propionate in the mammalian gut. Any molecule or metabolite found in the mammalian gut, in a healthy and/or disease state, may be used to induce payload expression. Non-limiting examples of inducers include propionate, bilirubin, aspartate aminotransferase, alanine aminotransferase, blood coagulation factors II, VII, IX, and X, alkaline phosphatase, gamma glutamyl transferase, hepatitis antigens and antibodies, alpha fetoprotein, anti-mitochondrial, smooth muscle, and anti-nuclear antibodies, iron, transferrin, ferritin, copper, ceruloplasmin, ammonia, and manganese. In alternate embodiments, the gene or gene cassette for producing EGF is under the control of a pBAD promoter, which is activated in the presence of the sugar arabinose.

[0247] In some embodiments, the gene or gene cassette for producing the EGF is present on a plasmid and operably linked to a promoter that is induced under low-oxygen or anaerobic conditions. In some embodiments, the gene or gene cassette for producing the EGF is present on a plasmid and operably linked to a temperature sensitive promoter. In some embodiments, the gene or gene cassette for producing EGF is present in the chromosome and operably linked to a promoter that is induced under low-oxygen or anaerobic conditions. In some embodiments, the gene or gene cassette for producing the EGF is present in the chromosome and operably linked to a temperature sensitive promoter. In some embodiments, the gene or gene cassette for producing EGF is present on a plasmid and operably linked to a promoter that is induced by molecules or metabolites that are specific to the mammalian gut. In some embodiments, the gene or gene cassette for producing EGF is present on a chromosome and operably linked to a promoter that is induced by molecules or metabolites that are specific to the tumor and/or the mammalian gut. In some embodiments, the gene or gene cassette for producing EGF is present on a chromosome and operably linked to a promoter that is induced by exposure to tetracycline. In some embodiments, the gene or gene cassette for producing EGF is present on a plasmid and operably linked to a promoter that is induced by exposure to tetracycline. In some embodiments, expression is further optimized by methods known in the art, e.g., by optimizing ribosomal binding sites, manipulating transcriptional regulators, and/or increasing mRNA stability.

[0248] In some embodiments, the recombinant bacteria comprise a stably maintained plasmid or chromosome carrying the gene or gene cassette for producing EGF, such that the gene or gene cassette can be expressed in the host cell, and the host cell is capable of survival and/or growth in vitro, e.g., in medium, and/or in vivo, e.g., in the gut. In some embodiments, a bacterium may comprise multiple copies of the gene or gene cassette for producing EGF. In some embodiments, gene or gene cassette for producing the payload is expressed on a low-copy plasmid. In some embodiments, the low-copy plasmid may be useful for increasing stability of expression. In some embodiments, the low-copy plasmid may be useful for decreasing leaky expression under non-inducing conditions. In some embodiments, gene or gene cassette for producing EGF is expressed on a high-copy plasmid. In some embodiments, the high-copy plasmid may be useful for increasing gene or gene cassette expression. In some embodiments, gene or gene cassette for producing EGF is expressed on a chromosome.

[0249] In some embodiments, the recombinant bacteria comprise a regulatory region comprising a propionate promoter, which is induced in the mammalian gut. In some embodiments, the propionate promoter sequence is at least about 80%, 85%, 90%, 95%, or 99% homologous to the sequence of SEQ ID NO: 172.

### Other Inducible Promoters

[0250] In some embodiments, the gene encoding EGF is present on a plasmid and operably linked to a promoter that is induced by one or more nutritional and/or chemical inducer(s) and/or metabolite(s). In some embodiments, the gene encoding EGF is present in the chromosome and operably linked to a promoter that is induced by one or more nutritional and/or chemical inducer(s) and/or metabolite(s).

[0251] In some embodiments, the bacterial cell comprises a stably maintained plasmid or chromosome carrying the one or more gene sequences(s), inducible by one or more nutritional and/or chemical inducer(s) and/or metabolite(s), encoding EGF, such that EGF can be expressed in the host cell, and the host cell is capable of survival and/or growth in vitro, e.g., in medium, and/or in vivo, e.g., in the gut. In some embodiments, bacterial cell comprises two or more distinct copies of the one or more gene sequences(s) encoding EGF, which is controlled by a promoter inducible one or more nutritional and/or chemical inducer(s) and/or metabolite(s). In some embodiments, the recombinant bacteria comprise multiple copies of the same one or more gene sequences(s) encoding EGF, which is controlled by a promoter inducible one or more nutritional and/or chemical inducer(s) and/or metabolite(s). In some embodiments, the one or more gene sequences(s) encoding EGF, is present on a plasmid and operably linked to a directly or indirectly inducible promoter inducible by one or more nutritional and/or chemical inducer(s) and/or metabolite(s). In some embodiments, the one or more gene sequences(s) encoding EGF, is present on a chromosome and operably linked to a directly or indirectly inducible by one or more nutritional and/or chemical inducer(s) and/or metabolite(s).

[0252] In some embodiments, expression of EGF is driven directly or indirectly by one or more promoter(s) induced by a chemical and/or nutritional inducer and/or metabolite during in vitro growth, preparation, or manufacturing of the strain prior to in vivo administration. In some embodiments, the promoter(s) induced by a chemical and/or nutritional inducer and/or metabolite are induced in culture, e.g., grown in a flask, fermenter or other appropriate culture vessel, e.g., used during cell growth, cell expansion, fermentation, recovery, purification, formulation, and/or manufacture. In some embodiments, the promoter is directly or indirectly induced by a molecule that is added to in the bacterial culture to induce expression and pre-load the bacterium with EGF prior to administration. In some embodiments, the cultures, which are induced by a chemical and/or nutritional inducer and/or metabolite, are grown aerobically. In some embodiments, the cultures, which are induced by a chemical and/or nutritional inducer and/or metabolite, are grown anaerobically.

[0253] In some embodiments, expression of one or more EGF molecules is driven directly or indirectly by one or more arabinose inducible promoter(s) in vivo. In some embodiments, the promoter is directly or indirectly induced by a chemical and/or nutritional inducer and/or metabolite which is co-administered with the recombinant bacteria, e.g., arabinose.

[0254] The genes of arabinose metabolism are organized in one operon, AraBAD, which is controlled by the PAraBAD promoter. The PAraBAD (or Para) promoter suitably fulfills the criteria of inducible expression systems. PAraBAD displays tighter control of payload gene expression than many other systems, likely due to the dual regulatory role of AraC, which functions both as an inducer and as a repressor. Additionally, the level of ParaBAD-based expression can be modulated over a wide range of L-arabinose concentrations to fine-tune levels of expression of the payload. However, the cell population exposed to sub-saturating L-arabinose concentrations is divided into two subpopulations of induced and uninduced cells, which is determined by the differences between individual cells in the availability of L-arabinose transporter (Zhang et al., Development and Application of an Arabinose-Inducible Expression System by Facilitating Inducer Uptake in Corynebacterium glutamicum; Appl. Environ. Microbiol. August 2012 vol. 78 no. 16 5831-5838). Alternatively, inducible expression from the ParaBad can be controlled or fine-tuned through the optimization of the ribosome binding site (RBS), as described herein.

[0255] In one embodiment, the arabinose inducible promoter drives the expression of a construct comprising EGF, jointly with a second promoter, e.g., a second constitutive or inducible promoter. In some embodiments, two promoters are positioned proximally to the construct and drive its expression, wherein the arabinose inducible promoter drives expression under a first set of exogenous conditions, and the second promoter drives the expression under a second set of exogenous conditions. In a non-limiting example, the first and second conditions may be two sequential culture conditions (i.e., during preparation of the culture in a flask, fermenter or other appropriate culture vessel, e.g., arabinose and IPTG). In another non-limiting example, the first inducing conditions may be culture conditions, e.g., including arabinose presence, and the second inducing conditions may be in vivo conditions. Such in vivo conditions include low-oxygen, microaerobic, or anaerobic conditions, presence of gut metabolites, and/or metabolites administered in combination with the bacterial strain. In some embodiments, the one or more arabinose promoters drive expression of EGF, in combination with the FNR promoter driving the expression of the same gene sequence(s).

[0256] In some embodiments, EGF is knocked into the arabinose operon and are driven by the native arabinose inducible promoter.

[0257] In some embodiments, the recombinant bacteria comprise one or more gene sequence(s) having at least 80%, 81%, 82%, 83%, 84%, 85%, 86%, 87%, 88%, 89%, 90%, 91%, 92%, 93%, 94%, 95%, 96%, 97%, 98%, or 99% identity with any of the sequences of SEQ ID NO: 174. In some embodiments, the arabinose inducible construct further comprises a gene encoding AraC, which is divergently transcribed from the same promoter as EGF. In some embodiments, the recombinant bacteria comprise one or more gene sequence(s) having at least 80%, 81%, 82%, 83%, 84%, 85%, 86%, 87%, 88%, 89%, 90%, 91%, 92%, 93%, 94%, 95%, 96%, 97%, 98%, or 99% identity with any of the sequences of SEQ ID NO: 174. In some embodiments, the recombinant bacteria comprise one or more gene sequence(s) encoding a polypeptide having at least 80%, 81%, 82%, 83%, 84%, 85%, 86%, 87%, 88%, 89%, 90%, 91%, 92%, 93%, 94%, 95%, 96%, 97%, 98%, or 99% identity with the polypeptide encoded by any of the sequences of SEQ ID NO: 175.

[0258] In some embodiments, the recombinant bacteria comprise one or more gene sequence(s) which are inducible through a rhamnose inducible system. The genes rhaBAD are organized in one operon which is controlled by the rhaP BAD promoter. The rhaP BAD promoter is regulated by two activators, RhaS and RhaR, and the corresponding genes belong to one transcription unit which divergently transcribed in the opposite direction of rhaBAD. In the presence of L-rhamnose, RhaR binds to the rhaP RS promoter and activates the production of RhaR and RhaS. RhaS together with L-rhamnose then bind to the rhaP BAD and the rhaP T promoter and activate the transcription of the structural genes. In contrast to the arabinose system, in which AraC is provided and divergently transcribed in the gene sequence(s), it is not necessary to express the regulatory proteins in larger quantities in the rhamnose expression system because the amounts expressed from the chromosome are sufficient to activate transcription even on multi-copy plasmids. Therefore, only the rhaP BAD promoter is cloned upstream of the gene that is to be expressed. Full induction of rhaBAD transcription also requires binding of the CRP-cAMP complex, which is a key regulator of catabolite repression. Alternatively, inducible expression from the rhaBAD can be controlled or fine-tuned through the optimization of the ribosome binding site (RBS), as described herein.

[0259] In one embodiment, expression of EGF is driven directly or indirectly by one or more rhamnose inducible promoter(s). In one embodiment, expression of the payload is driven directly or indirectly by a rhamnose inducible promoter.

[0260] In some embodiments, the rhamnose inducible promoter is useful for or induced during in vivo expression of EGF. In some embodiments, expression of EGF is driven directly or indirectly by one or more rhamnose inducible promoter(s) in vivo. In some embodiments, the promoter is directly or indirectly induced by a molecule that is co-administered with the recombinant bacteria, e.g., rhamnose.

[0261] In one embodiment, the rhamnose inducible promoter drives the expression of a construct comprising EGF jointly with a second promoter, e.g., a second constitutive or inducible promoter. In some embodiments, two promoters are positioned proximally to the construct and drive its expression, wherein the rhamnose inducible promoter drives expression under a first set of exogenous conditions, and the second promoter drives the expression under a second set of exogenous conditions.

[0262] In some embodiments, the recombinant bacteria comprise one or more gene sequence(s) having at least 80%, 81%, 82%, 83%, 84%, 85%, 86%, 87%, 88%, 89%, 90%, 91%, 92%, 93%, 94%, 95%, 96%, 97%, 98%, or 99% identity with any of the sequences of SEQ ID NO: 176.

[0263] In some embodiments, the recombinant bacteria comprise one or more gene sequence(s) which are inducible through an Isopropyl β-D-1-thiogalactopyranoside (IPTG) inducible system or other compound which induced transcription from the Lac Promoter. IPTG is a molecular mimic of allolactose, a lactose metabolite that activates transcription of the lac operon. In contrast to allolactose, the sulfur atom in IPTG creates a non-hydrolyzable chemical blond, which prevents the degradation of IPTG, allowing the concentration to remain constant. IPTG binds to the lac repressor and releases the tetrameric repressor (lacd) from the lac operator in an allosteric manner, thereby allowing the transcription of genes in the lac operon. Since IPTG is not metabolized by E. coli, its concentration stays constant and the rate of expression of Lac promoter-controlled is tightly controlled, both in vivo and in vitro. IPTG intake is independent on the action of lactose permease, since other transport pathways are also involved. Inducible expression from the PLac can be controlled or fine-tuned through the optimization of the ribosome binding site (RBS), as described herein. Other compounds which inactivate LacI, can be used instead of IPTG in a similar manner.

[0264] In one embodiment, expression of EGF is driven directly or indirectly by one or more IPTG inducible promoter(s). In some embodiments, the IPTG inducible promoter is useful for or induced during in vivo expression of EGF. In some embodiments, expression of EGF is driven directly or indirectly by one or more IPTG inducible promoter(s) in vivo. In some embodiments, the promoter is directly or indirectly induced by a molecule that is co-administered with the recombinant bacteria, e.g., IPTG.

[0265] In one embodiment, the IPTG inducible promoter drives the expression of a construct comprising EGF jointly with a second promoter, e.g., a second constitutive or inducible promoter. In some embodiments, two promoters are positioned proximally to the construct and drive its expression, wherein the IPTG inducible promoter drives expression under a first set of exogenous conditions, and the second promoter drives the expression under a second set of exogenous conditions.

[0266] In some embodiments, the recombinant bacteria comprise one or more gene sequence(s) having at least 80%, 81%, 82%, 83%, 84%, 85%, 86%, 87%, 88%, 89%, 90%, 91%, 92%, 93%, 94%, 95%, 96%, 97%, 98%, or 99% identity with any of the sequences of SEQ ID NO: 177. In some embodiments, the IPTG inducible construct further comprises a gene encoding lacI, which is divergently transcribed from the same promoter EGF. In some embodiments, the recombinant bacteria comprise one or more gene sequence(s) having at least 80%, 81%, 82%, 83%, 84%, 85%, 86%, 87%, 88%, 89%, 90%, 91%, 92%, 93%, 94%, 95%, 96%, 97%, 98%, or 99% identity with any of the sequences of SEQ ID NO: 177. In some embodiments, the recombinant bacteria comprise one or more gene sequence(s) encoding a polypeptide having at least 80%, 81%, 82%, 83%, 84%, 85%, 86%, 87%, 88%, 89%, 90%, 91%, 92%, 93%, 94%, 95%, 96%, 97%, 98%, or 99% identity with the polypeptide encoded by any of the sequences of SEQ ID NO: 180.

[0267] In some embodiments, the recombinant bacteria comprise one or more gene sequence(s) which are inducible through a tetracycline inducible system. The initial system Gossen and Bujard (Tight control of gene expression in mammalian cells by tetracycline-responsive promoters. Gossen M & Bujard H. PNAS, 1992 Jun. 15; 89(12):5547-51) developed is known as tetracycline off: in the presence of tetracycline, expression from a tet-inducible promoter is reduced. Tetracycline-controlled transactivator (tTA) was created by fusing tetR with the C-terminal domain of VP16 (virion protein 16) from herpes simplex virus. In the absence of tetracycline, the tetR portion of tTA will bind tetO sequences in the tet promoter, and the activation domain promotes expression. In the presence of tetracycline, tetracycline binds to tetR, precluding tTA from binding to the tetO sequences. Next, a reverse Tet repressor (rTetR), was developed which created a reliance on the presence of tetracycline for induction, rather than repression. The new transactivator rtTA (reverse tetracycline-controlled transactivator) was created by fusing rTetR with VP16. The tetracycline on system is also known as the rtTA-dependent system.

[0268] In one embodiment, expression of EGF is driven directly or indirectly by one or more tetracycline inducible promoter(s). In some embodiments, the tetracycline inducible promoter is useful for or induced during in vivo expression of EGF. In some embodiments, expression of EGF and/or transcriptional regulator(s), e.g., FNRS24Y, is driven directly or indirectly by one or more tetracycline inducible promoter(s) in vivo. In some embodiments, the promoter is directly or indirectly induced by a molecule that is co-administered with the recombinant bacteria, e.g., tetracycline

[0269] In some embodiments, the recombinant bacteria comprise one or more gene sequence(s) having at least 80%, 81%, 82%, 83%, 84%, 85%, 86%, 87%, 88%, 89%, 90%, 91%, 92%, 93%, 94%, 95%, 96%, 97%, 98%, or 99% identity with any of the bolded sequences of SEQ ID NO: 181 (tet promoter is in bold). In some embodiments, the tetracycline inducible construct further comprises a gene encoding AraC, which is divergently transcribed from the same promoter as EGF. In some embodiments, the recombinant bacteria comprise one or more gene sequence(s) having at least 80%, 81%, 82%, 83%, 84%, 85%, 86%, 87%, 88%, 89%, 90%, 91%, 92%, 93%, 94%, 95%, 96%, 97%, 98%, or 99% identity with any of the sequences of SEQ ID NO: 182 in italics (Tet repressor is in italics). In some embodiments, the recombinant bacteria comprise one or more gene sequence(s) encoding a polypeptide having at least 80%, 81%, 82%, 83%, 84%, 85%, 86%, 87%, 88%, 89%, 90%, 91%, 92%, 93%, 94%, 95%, 96%, 97%, 98%, or 99% identity with the polypeptide encoded by any of the sequences of SEQ ID NO: 182 in italics (Tet repressor is in italics).

[0270] In some embodiments, the recombinant bacteria comprise one or more gene sequence(s) whose expression is controlled by a temperature sensitive mechanism. Thermoregulators are advantageous because of strong transcriptional control without the use of external chemicals or specialized media (see, e.g., Nemani et al., Magnetic nanoparticle hyperthermia induced cytosine deaminase expression in microencapsulated E. coli for enzyme-prodrug therapy; J Biotechnol. 2015 Jun. 10; 203: 32-40, and references therein). Thermoregulated protein expression using the mutant cI857 repressor and the pL and/or pR phage λ promoters have been used to engineer recombinant bacterial strains. The EGF gene cloned downstream of the λ promoters can then be efficiently regulated by the mutant thermolabile cI857 repressor of bacteriophage λ. At temperatures below 37° C., cI857 binds to the oL or oR regions of the pR promoter and blocks transcription by RNA polymerase. At higher temperatures, the functional cI857 dimer is destabilized, binding to the oL or oR DNA sequences is abrogated, and mRNA transcription is initiated. An exemplary construct is depicted in in the figures and examples. Inducible expression from the temperature sensitive promoter can be controlled or further fine-tuned through the optimization of the ribosome binding site (RBS), as described herein.

[0271] In one embodiment, expression of EGF is driven directly or indirectly by one or more thermoregulated promoter(s). In some embodiments, thermoregulated promoter is useful for or induced during in vivo expression of EGF. In some embodiments, expression of EGF is driven directly or indirectly by one or more thermoregulated promoter(s) in vitro.

[0272] In some embodiments, expression of EGF is driven directly or indirectly by one or more thermoregulated promoter(s) during in vitro growth, preparation, or manufacturing of the strain prior to in vivo administration. In some embodiments, it may be advantageous to shup off production of EGF. This can be done in a thermoregulated system by growing the strain at lower temperatures, e.g., 30° C. Expression can then be induced by elevating the temperature to 37° C. and/or 42° C. In some embodiments, thermoregulated promoter(s) are induced in culture, e.g., grown in a flask, fermenter or other appropriate culture vessel, e.g., used during cell growth, cell expansion, fermentation, recovery, purification, formulation, and/or manufacture. In some embodiments, the cultures, which are induced by temperatures between 37° C. and 42° C., are grown aerobically. In some embodiments, the cultures, which are induced by induced by temperatures between 37° C. and 42° C., are grown anaerobically.

[0273] In some embodiments, the recombinant bacteria comprise one or more gene sequence(s) having at least 80%, 81%, 82%, 83%, 84%, 85%, 86%, 87%, 88%, 89%, 90%, 91%, 92%, 93%, 94%, 95%, 96%, 97%, 98%, or 99% identity with any of the sequences of SEQ ID NO: 183. In some embodiments, thermoregulated construct further comprises a gene encoding mutant cI857 repressor, which is divergently transcribed from the same promoter as EGF. In some embodiments, the recombinant bacteria comprise one or more gene sequence(s) having at least 80%, 81%, 82%, 83%, 84%, 85%, 86%, 87%, 88%, 89%, 90%, 91%, 92%, 93%, 94%, 95%, 96%, 97%, 98%, or 99% identity with any of the sequences of SEQ ID NO: 184. In some embodiments, the recombinant bacteria comprise one or more gene sequence(s) encoding a polypeptide having at least 80%, 81%, 82%, 83%, 84%, 85%, 86%, 87%, 88%, 89%, 90%, 91%, 92%, 93%, 94%, 95%, 96%, 97%, 98%, or 99% identity with the polypeptide encoded by any of the sequences of SEQ ID NO: 185.

[0274] In some instances, thermoregulators may be advantageous because of strong transcriptional control without the use of external chemicals or specialized media. Thermoregulated protein expression using the mutant cI857 repressor and the pL and/or pR phage a promoters have been used to engineer recombinant bacterial strains. For example, a gene of interest cloned downstream of the a promoters can be efficiently regulated by the mutant thermolabile cI857 repressor of bacteriophage a. At temperatures below 37° C., cI857 binds to the oL or oR regions of the pR promoter and inhibits transcription by RNA polymerase. At higher temperatures, the functional cI857 dimer is destabilized, binding to the oL or oR DNA sequences is abrogated, and mRNA transcription is initiated.

[0275] In certain instances, it may be advantageous to reduce, diminish, or shut off production of one or more protein(s) of interest. This can be done in a thermoregulated system by growing a bacterial strain at temperatures at which the temperature regulated system is not optimally active. Temperature regulated expression can then be induced as desired by changing the temperature to a temperature where the system is more active or optimally active.

[0276] For example, a thermoregulated promoter may be induced in culture, e.g., grown in a flask, fermenter or other appropriate culture vessel, e.g., used during cell growth, cell expansion, fermentation, recovery, purification, formulation, and/or manufacture. Bacteria comprising gene sequences or gene cassettes either indirectly or directly operably linked to a temperature sensitive system or promoter may, for example, could be induced by temperatures between 37° C. and 42° C. In some instances, the cultures may be grown aerobically. Alternatively, the cultures are grown anaerobically.

[0277] In some embodiments, the bacteria described herein comprise one or more gene sequence(s) or gene cassette(s) which are directly or indirectly operably linked to a temperature regulated promoter. In some embodiments, the gene sequence(s) or gene cassette(s) are induced in vitro during growth, preparation, or manufacturing of the strain prior to in vivo administration. In some embodiments, the gene sequence(s) are induced upon or during in vivo administration. In some embodiments, the gene sequence(s) are induced during in vitro growth, preparation, or manufacturing of the strain prior to in vivo administration and upon or during in vivo administration. In some embodiments, the genetically engineered bacteria further comprise gene sequence (s) encoding a transcription factor which is capable of binding to the temperature sensitive promoter. In some embodiments, the transcription factor is a repressor of transcription.

[0278] In some embodiments, the thermoregulated promoter drives the expression of one or more protein(s) of interest from a low-copy plasmid or a high copy plasmid. In some embodiments, the thermoregulated promoter drives the expression of one or more protein(s) of interest from a construct which is integrated into the bacterial chromosome. Exemplary insertion sites are described herein.

[0279] In some embodiments, the genetically engineered bacteria comprise one or more gene sequence(s) having at least 80%, 81%, 82%, 83%, 84%, 85%, 86%, 87%, 88%, 89%, 90%, 91%, 92%, 93%, 94%, 95%, 96%, 97%, 98%, or 99% identity with any of the sequences of SEQ ID NO: 209. In some embodiments, the genetically engineered bacteria comprise one or more gene sequence(s) having at least 80%, 81%, 82%, 83%, 84%, 85%, 86%, 87%, 88%, 89%, 90%, 91%, 92%, 93%, 94%, 95%, 96%, 97%, 98%, or 99% identity with any of the sequences of SEQ ID NO: 213. In some embodiments, the genetically engineered bacteria comprise one or more gene sequence(s) having at least 80%, 81%, 82%, 83%, 84%, 85%, 86%, 87%, 88%, 89%, 90%, 91%, 92%, 93%, 94%, 95%, 96%, 97%, 98%, or 99% identity with any of the sequences of SEQ ID NO: 216. In some embodiments, the thermoregulated construct further comprises a gene encoding mutant cI857 repressor, which is divergently transcribed from the same promoter as the one or more one or more protein(s) of interest. In some embodiments, the genetically engineered bacteria comprise one or more gene sequence(s) having at least 80%, 81%, 82%, 83%, 84%, 85%, 86%, 87%, 88%, 89%, 90%, 91%, 92%, 93%, 94%, 95%, 96%, 97%, 98%, or 99% identity with any of the sequences of SEQ ID NO: 210. In some embodiments, the genetically engineered bacteria comprise one or more gene sequence(s) encoding a polypeptide having at least 80%, 81%, 82%, 83%, 84%, 85%, 86%, 87%, 88%, 89%, 90%, 91%, 92%, 93%, 94%, 95%, 96%, 97%, 98%, or 99% identity with the polypeptide encoded by any of the sequences of SEQ ID NO: 212. In some embodiments, the thermoregulated construct further comprises a gene encoding mutant cI38 repressor, which is divergently transcribed from the same promoter as the one or more one or more protein(s) of interest. In some embodiments, the genetically engineered bacteria comprise one or more gene sequence(s) having at least 80%, 81%, 82%, 83%, 84%, 85%, 86%, 87%, 88%, 89%, 90%, 91%, 92%, 93%, 94%, 95%, 96%, 97%, 98%, or 99% identity with any of the sequences of SEQ ID NO: 214. In some embodiments, the genetically engineered bacteria comprise one or more gene sequence(s) encoding a polypeptide having at least 80%, 81%, 82%, 83%, 84%, 85%, 86%, 87%, 88%, 89%, 90%, 91%, 92%, 93%, 94%, 95%, 96%, 97%, 98%, or 99% identity with the polypeptide encoded by any of the sequences of SEQ ID NO: 215.

[0280] SEQ ID NOs: 209, 210, and 212-16 are shown in Table 14.

TABLE 14
Inducible promoter construct sequences

| Description | Sequence |
|---|---|
| Region comprising | ACGTTAAATCTATCACCGCAAGGGATAAATATCTAACACC |
| Temperature sensitive | GTGCGTGTTGACTATTTTACCTCTGGCGGTGATAATGGTT |
| promoter | GCATAGCTGTCACCGGATGTGCTTTCCGGTCTGATGAGTC |
| SEQ ID NO: 209 | CGTGAGGACGAAACAGCCTCTACAAATAATTTTGTTTAAA |
| | ACAACACCCACTAAGATAACTCTAGAAATAATTTTGTTTA |
| | ACTTTAAGAAGGAGATATACAT |
| mutant cI857 repressor | TCAGCCAAACGTCTCTTCAGGCCACTGACTAGCGATAACT |
| nucleotide sequence | TTCCCCACAACGGAACAACTCTCATTGCATGGGATCATTG |
| SEQ ID NO: 210 | GGTACTGTGGGTTTAGTGGTTGTAAAAACACCTGACCGCT |
| | ATCCCTGATCAGTTTCTTGAAGGTAAACTCATCACCCCCA |
| | AGTCTGGCTATGCAGAAATCACCTGGCTCAACAGCCTGCT |
| | CAGGGTCAACGAGAATTAACATTCCGTCAGGAAAGCTTGG |
| | CTTGGAGCCTGTTGGTGCGGTCATGGAATTACCTTCAACC |
| | TCAAGCCAGAATGCAGAATCACTGGCTTTTTTGGTTGTGC |
| | TTACCCATCTCTCCGCATCACCTTTGGTAAAGGTTCTAAG |
| | CTTAGGTGAGAACATCCCTGCCTGAACATGAGAAAAAACA |
| | GGGTACTCATACTCACTTCTAAGTGACGGCTGCATACTAA |
| | CCGCTTCATACATCTCGTAGATTTCTCTGGCGATTGAAGG |
| | GCTAAATTCTTCAACGCTAACTTTGAGAATTTTTGTAAGC |
| | AATGCGGCGTTATAAGCATTTAATGCATTGATGCCATTAA |
| | ATAAAGCACCAACGCCTGACTGCCCCATCCCCATCTTGTC |
| | TGCGACAGATTCCTGGGATAAGCCAAGTTCATTTTTCTTT |
| | TTTTCATAAATTGCTTTAAGGCGACGTGCGTCCTCAAGCT |
| | GCTCTTGTGTTAATGGTTTCTTTTTTGTGCTCAT |
| mutant cI857 repressor | MSTKKKPLTQEQLEDARRLKAIYEKKKNELGLSQESVADK |
| polypeptide sequence | MGMGQSGVGALFNGINALNAYNAALLTKILKVSVEEFSPS |
| SEQ ID NO: 212 | IAREIYEMYEAVSMQPSLRSEYEYPVFSHVQAGMFSPKLR |
| | TFTKGDAERWVSTTKKASDSAFWLEVEGNSMTAPTGSKPS |
| | FPDGMLILVDPEQAVEPGDFCIARLGGDEFTFKKLIRDSG |
| | QVFLQPLNPQYPMIPCNESCSVVGKVIASQWPEETFG |
| Pr/Pl promoter | ACGTTAAATCTATCACCGCAAGGGATAAATATCTAACACC |
| SEQ ID NO: 213 | GTGCGTGTTGACTATTTTACCTCTGGCGGTGATAATGGTT |
| | GCAT |
| mutant cI38 repressor | Atgagcacaaaaaagaaaccattaacacaagagcagcttg |
| nucleotide sequence | aggacgcacgtcgccttaaagcaatttatgaaaaaaagaa |
| SEQ ID NO: 214 | aaatgaacttggcttatcccaggaatctgtcgcagacaag |
| | atggggatggggcagtcaggcgttggtgccttatttaatg |
| | gcatcaatgcattaaatgcttataacgccgcatcgcttac |
| | aagaattctcaaagttagcgttgaagaatttagcccttca |
| | atcgccagagaaatctacgagatgtatgaagcggttagta |
| | tgcagccgtcacttagaagtgagtatgagtaccctgtttt |
| | ttctcatgttcaggcagggatgctctcacctgagcttaga |
| | acctttaccaaaggtggtgcggaaaggtgggtaagcacaa |
| | ccaaaaaagccagtgattctgcattctggcttgaggttga |
| | aggtaattccatgacagcaccaacaggctccaagccaagc |
| | tttcctgacggaatgttaattctcgttgaccctgagcagg |
| | ctgttgagccaggtgatttctgcatagccagactcggggg |
| | tggtgagtttaccttcaagaaactgatcagggatagcggt |
| | caggtgtttttacaaccactaaacccacagtacccaatga |
| | tcccatgcaatgagagttgttccgttgtggggaaagttat |
| | cgctagtcagtggcctgaagagacgtttggctga |
| mutant cI38 repressor | MSTKKKPLTQEQLEDARRLKAIYEKKKNELGLSQESVADK |
| polypeptide sequence | MGMGQSGVGALFNGINALNAYNAASLTRILKVSVEEFSPS |
| SEQ ID NO: 215 | IAREIYEMYEAVSMQPSLRSEYEYPVFSHVQAGMLSPELR |
| | TFTKGGAERWVSTTKKASDSAFWLEVEGNSMTAPTGSKPS |
| | FPDGMLILVDPEQAVEPGDFCIARLGGGEFTFKKLIRDSG |
| | QVFLQPLNPQYPMIPCNESCSVVGKVIASQWPEETFG |
| Temperature sensitive | aaatctatcaccgcaagggataaatatctaacaccgtgcg |
| promoter | tgttgactattttacctctggcggtgataatggttgcATa |
| SEQ ID NO: 216 | gctgtcaccggatgtgctttccggtctgatgagtccgtga |
| | ggacgaaacagcctctacaaataattttgtttaaAACAAC |
| | ACCCACTAAGATAAGGTAGAAAC |

The following is an exemplary construct comprising a temperature sensitive promoter-ompA-EGF and mutant cI857 repressor driven by temperature sensitive promoter in reverse orientation: TCAGCCAAACGTCTCTTCAGGCCACTGACTAGCGATAACTTTCCCCACAACGGAACAA CTCTCATTGCATGGGATCATTGGGTACTGTGGGTTTAGTGGTTGTAAAAACACCTGAC CGCTATCCCTGATCAGTTTCTTGAAGGTAAACTCATCACCCCCAAGTCTGGCTATGCA GAAATCACCTGGCTCAACAGCCTGCTCAGGGTCAACGAGAATTAACATTCCGTCAGG AAAGCTTGGCTTGGAGCCTGTTGGTGCGGTCATGGAATTACCTTCAACCTCAAGCCAG AATGCAGAATCACTGGCTTTTTTGGTTGTGCTTACCCATCTCTCCGCATCACCTTTGGT AAAGGTTCTAAGCTTAGGTGAGAACATCCCTGCCTGAACATGAGAAAAAACAGGGTA CTCATACTCACTTCTAAGTGACGGCTGCATACTAACCGCTTCATACATCTCGTAGATTT CTCTGGCGATTGAAGGGCTAAATTCTTCAACGCTAACTTTGAGAATTTTTGTAAGCAA TGCGGCGTTATAAGCATTTAATGCATTGATGCCATTAAATAAAGCACCAACGCCTGAC TGCCCCATCCCCATCTTGTCTGCGACAGATTCCTGGGATAAGCCAAGTTCATTTTTCTT TTTTTCATAAATTGCTTTAAGGCGACGTGCGTCCTCAAGCTGCTCTTGTGTTAATGGTT TCTTTTTTGTGCTCATACGTTAAATCTATCACCGCAAGGGATAAATATCTAACACCGTG CGTGTTGACTATTTTACCTCTGGCGGTGATAATGGTTGCATaataattttgtttaactttaagaaggaggta tacatATGAAGAAAACCGCAATTGCAATCGCCGTCGCTCTGGCGGGGTTCGCTACGGTCG CCCAAGCCAATAGTGACAGCGAATGTCCGCTGTCGCACGATGGTTATTGCCTTCATGA TGGGGTGTGCATGTACATTGAGGCATTGGACAAATATGCCTGCAACTGTGTTGTCGGC TATATCGGCGAACGGTGTCAGTACCGTGATCTGAAATGGTGGGAATTACGC (SEQ ID NO: BB). In some embodiments, the bacterium disclosed herein comprises a sequence that is 80%, 85%, 90%, 91%, 92%, 93%, 94%, 95%, 96%, 97%, 98%, 99%, or 100% identical to SEQ ID NO: BB or a fragment thereof.
The following is an exemplary temperature sensitive promoter (SEQ ID NO: 213): ACGTTAAATCTATCACCGCAAGGGATAAATATCTAACACCGTGCGTGTTGACTATTTT ACCTCTGGCGGTGATAATGGTTGCAT. In some embodiments, the bacterium disclosed herein comprises a sequence that is 80%, 85%, 90%, 91%, 92%, 93%, 94%, 95%, 96%, 97%, 98%, 99%, or 100% identical to SEQ ID NO: 213 or a fragment thereof.

[0281] In some embodiments, the recombinant bacteria comprise one or more gene sequence(s) which are indirectly inducible through a system driven by the PssB promoter. The Pssb promoter is active under aerobic conditions, and shuts off under anaerobic conditions.

[0282] This promoter can be used to express an EGF gene under aerobic conditions. This promoter can also be used to tightly control the expression of a gene product such that it is only expressed under anaerobic conditions. In this case, the oxygen induced PssB promoter induces the expression of a repressor, which represses the expression of an EGF gene. As a result, the EGF gene is only expressed in the absence of the repressor, i.e., under anaerobic conditions. This strategy has the advantage of an additional level of control for improved fine-tuning and tighter control.

[0283] In one embodiment, expression of EGF is indirectly regulated by a repressor expressed under the control of one or more PssB promoter(s). In some embodiments, induction of the RssB promoter(s) indirectly drives the in vivo expression of EGF. In some embodiments, induction of the RssB promoter(s) indirectly drives the expression of EGF during in vitro growth, preparation, or manufacturing of the strain prior to in vivo administration.

[0284] Bacteria comprising one or more sequence(s) having at least 80%, 81%, 82%, 83%, 84%, 85%, 86%, 87%, 88%, 89%, 90%, 91%, 92%, 93%, 94%, 95%, 96%, 97%, 98%, or 99% identity with any of the sequences disclosed herein are also contemplated. In some embodiments, the bacterium comprises one or more sequence(s) having at least 80%, 81%, 82%, 83%, 84%, 85%, 86%, 87%, 88%, 89%, 90%, 91%, 92%, 93%, 94%, 95%, 96%, 97%, 98%, or 99% identity with a promoter disclosed herein, e.g., a thermoregulated promoter or a promoter induced under low-oxygen or anerobic conditions. In some embodiments, the bacterium comprises one or more sequence(s) having at least 80%, 81%, 82%, 83%, 84%, 85%, 86%, 87%, 88%, 89%, 90%, 91%, 92%, 93%, 94%, 95%, 96%, 97%, 98%, or 99% identity with a secretion molecule disclosed herein, e.g., nucleotide or amino acid sequence, e.g., ompA. In some embodiments, the bacterium comprises one or more sequence(s) having at least 80%, 81%, 82%, 83%, 84%, 85%, 86%, 87%, 88%, 89%, 90%, 91%, 92%, 93%, 94%, 95%, 96%, 97%, 98%, or 99% identity with an EGF disclosed herein, e.g., nucleotide or amino acid sequence.

[0285] In a non-limiting example, this strategy can be used to control expression of thyA and/or dapA, e.g., to make a conditional auxotroph. The chromosomal copy of dapA or ThyA is knocked out. Under anaerobic conditions, dapA or thyA—as the case may be—are expressed, and the strain can grow in the absence of dap or thymidine. Under aerobic conditions, dapA or thyA expression is shut off, and the strain cannot grow in the absence of dap or thymidine. Such a strategy can, for example be employed to allow survival of bacteria under anaerobic conditions, e.g., the gut, but prevent survival under aerobic conditions (biosafety switch). In some embodiments, the recombinant bacteria comprise one or more gene sequence(s) having at least 80%, 81%, 82%, 83%, 84%, 85%, 86%, 87%, 88%, 89%, 90%, 91%, 92%, 93%, 94%, 95%, 96%, 97%, 98%, or 99% identity with any of the sequences of SEQ ID NO: 188. In some embodiments, the inducible promoters, as described above, drive the expression of EGF from a low-copy plasmid or a high copy plasmid or a biosafety system plasmid described herein. In some embodiments, the inducible promoters drive the expression of EGF from a construct which is integrated into the bacterial chromosome.

### Constitutive Promoters

[0286] In some embodiments, the gene encoding the payload is present on a plasmid and operably linked to a constitutive promoter. In some embodiments, the gene encoding the payload is present on a chromosome and operably linked to a constitutive promoter.

[0287] In some embodiments, the constitutive promoter is active under in vivo conditions, e.g., the gut, as described herein. In some embodiments, the promoters is active under in vitro conditions, e.g., various cell culture and/or cell manufacturing conditions, as described herein. In some embodiments, the constitutive promoter is active under in vivo conditions, e.g., the gut, as described herein, and under in vitro conditions, e.g., various cell culture and/or cell production and/or manufacturing conditions, as described herein.

[0288] In some embodiments, the constitutive promoter that is operably linked to the gene encoding the payload is active in various exogenous environmental conditions (e.g., in vivo and/or in vitro and/or production/manufacturing conditions).

[0289] In some embodiments, the constitutive promoter is active in exogenous environmental conditions specific to the gut of a mammal. In some embodiments, the constitutive promoter is active in exogenous environmental conditions specific to the small intestine of a mammal. In some embodiments, the constitutive promoter is active in low-oxygen or anaerobic conditions such as the environment of the mammalian gut. In some embodiments, the constitutive promoter is active in the presence of molecules or metabolites that are specific to the gut of a mammal. In some embodiments, the constitutive promoter is directly or indirectly induced by a molecule that is co-administered with the bacterial cell. In some embodiments, the constitutive promoter is active in the presence of molecules or metabolites or other conditions, that are present during in vitro culture, cell production and/or manufacturing conditions.

[0290] Bacterial constitutive promoters are known in the art. Exemplary constitutive promoters include E. coli σ70, such as BBa_114034 (SEQ ID NO: 189), BBa_1732021 (SEQ ID NO: 190), BBa_1742126 (SEQ ID NO: 191), BBa_J01006 (SEQ ID NO: 192), BBa_J23100 (SEQ ID NO: 193), BBa_J23101 (SEQ ID NO: 194), BBa_J23102 (SEQ ID NO: 195), BBa_J23103 (SEQ ID NO: 196), BBa_J23104 (SEQ ID NO: 197), BBa_J23105 (SEQ ID NO: 198), BBa_J23106 (SEQ ID NO: 199), BBa_J23107 (SEQ ID NO: 200), BBa_J23108 (SEQ ID NO: 201), BBa_J23109 (SEQ ID NO: 202), BBa_J23110 (SEQ ID NO: 203), BBa_J23111 (SEQ ID NO: 204), BBa_J23112 (SEQ ID NO: 205), BBa_J23113 (SEQ ID NO: 206), BBa_J23114 (SEQ ID NO: 207), BBa_J23115 (SEQ ID NO: 208), BBa_J23116 (SEQ ID NO: 209), BBa_J23117 (SEQ ID NO: 210), BBa_J23118 (SEQ ID NO: 211), BBa_J23119 (SEQ ID NO: 212), BBa_J23150 (SEQ ID NO: 213), BBa_J23151 (SEQ ID NO: 214), BBa_J44002 (SEQ ID NO: 215), BBa_J48104 (SEQ ID NO: 216), BBa_J54200 (SEQ ID NO: 217), BBa_J56015 (SEQ ID NO: 218), BBa_J64951 (SEQ ID NO: 219), BBa_K088007 (SEQ ID NO: 220), BBa_K119000 (SEQ ID NO: 221), BBa_K119001 (SEQ ID NO: 222), BBa_K1330002 (SEQ ID NO: 223), BBa_K137029 (SEQ ID NO: 224), BBa_K137030 (SEQ ID NO: 225), BBa_K137031 (SEQ ID NO: 226), BBa_K137032 (SEQ ID NO: 227), BBa_K137085 (SEQ ID NO: 228), BBa_K137086 (SEQ ID NO: 229), BBa_K137087 (SEQ ID NO: 230), BBa_K137088 (SEQ ID NO: 231), BBa_K137089 (SEQ ID NO: 232), BBa_K137090 (SEQ ID NO: 233), BBa_K137091 (SEQ ID NO: 234), BBa_K1585100 (SEQ ID NO: 235), BBa_K1585101 (SEQ ID NO: 236), BBa_K1585102 (SEQ ID NO: 237), BBa_K1585103 (SEQ ID NO: 238), BBa_K1585104 (SEQ ID NO: 239), BBa_K1585105 (SEQ ID NO: 240), BBa_K1585106 (SEQ ID NO: 241), BBa_K1585110 (SEQ ID NO: 242), BBa_K1585113 (SEQ ID NO: 243), BBa_K1585115 (SEQ ID NO: 244), BBa_K1585116 (SEQ ID NO: 245), BBa_K1585117 (SEQ ID NO: 246), BBa_K1585118 (SEQ ID NO: 247), BBa_K1585119 (SEQ ID NO: 248), BBa_K1824896 (SEQ ID NO: 249), BBa_K256002 (SEQ ID NO: 250), BBa_K256018 (SEQ ID NO: 251), BBa_K256020 (SEQ ID NO: 252), BBa_K256033 (SEQ ID NO: 253), BBa_K292000 (SEQ ID NO: 254), BBa_K292001 (SEQ ID NO: 255), BBa_K418000 (SEQ ID NO: 256), BBa_K418002 (SEQ ID NO: 257), BBa_K418003 (SEQ ID NO: 258), BBa_K823004 (SEQ ID NO: 259), BBa_K823005 (SEQ ID NO: 260), BBa_K823006 (SEQ ID NO: 261), BBa_K823007 (SEQ ID NO: 262), BBa_K823008 (SEQ ID NO: 263), BBa_K823010 (SEQ ID NO: 264), BBa_K823011 (SEQ ID NO: 265), BBa_K823013 (SEQ ID NO: 266), BBa_K823014 (SEQ ID NO: 267), BBa_M13101 (SEQ ID NO: 268), BBa_M13102 (SEQ ID NO: 269), BBa_M13103 (SEQ ID NO: 270), BBa_M13104 (SEQ ID NO: 271), BBa_M13105 (SEQ ID NO: 272), BBa_M13106 (SEQ ID NO: 273), BBa_M13108 (SEQ ID NO: 274), BBa_M13110 (SEQ ID NO: 275), BBa_M31519 (SEQ ID NO: 276), BBa_R1074 (SEQ ID NO: 277), BBa_R1075 (SEQ ID NO: 278), BBa_S03331 (SEQ ID NO: 279), BBa_114018 (SEQ ID NO: 280), and BBa_114033 (SEQ ID NO: 281). Exemplary constitutive promoters include E. coli 6S promoters, e.g., BBa_J45992 (SEQ ID NO: 282), and BBa_J45993 (SEQ ID NO: 283). Exemplary constitutive promoters further include constitutive E. coli 632 promoters, e.g, BBa_J45504 (SEQ ID NO: 284), BBa_K1895002 (SEQ ID NO: 285), and BBa_K1895003 (SEQ ID NO: 286). Exemplary constitutive promoters further include constitutive B. subtilis σA promoters, e.g., BBa_K780003 (SEQ ID NO: 287), BBa_K823000 (SEQ ID NO: 288), BBa_K823002 (SEQ ID NO: 289), and BBa_K823003 (SEQ ID NO: 290), BBa_K14301 (SEQ ID NO: 291), BBa_K143013 (SEQ ID NO: 292). Exemplary constitutive promoters further include constitutive B. subtilis σB promoters, e.g., BBa_K143010 (SEQ ID NO: 291), BBa_K143011 (SEQ ID NO: 292), BBa_K143013 (SEQ ID NO: 293). Exemplary constitutive promoters further include BBa_K112706 (SEQ ID NO: 294) and BBa_K112707 (SEQ ID NO: 295) promoters.

[0291] Exemplary promoters from Bacteriophage T7 or SP6 or various prokaryotes include BBa_K143010 (SEQ ID NO: 293), BBa_K143011 (SEQ ID NO: 294), BBa_K143013 (SEQ ID NO: 295), BBa_I712074 (SEQ ID NO: 296), BBa_I719005 (SEQ ID NO: 297), BBa_J34814 (SEQ ID NO: 298), BBa_J64997 (SEQ ID NO: 299), BBa_K113010 (SEQ ID NO: 300), BBa_K113011 (SEQ ID NO: 301), BBa_K113012 (SEQ ID NO: 302), BBa_K1614000 (SEQ ID NO: 303), BBa_R0085 (SEQ ID NO: 304), BBa_R0180 (SEQ ID NO: 305), BBa_R0181 (SEQ ID NO: 306), BBa_R0182 (SEQ ID NO: 307), BBa_R0183 (SEQ ID NO: 308), BBa_Z0251 (SEQ ID NO: 309), BBa_Z0252 (SEQ ID NO: 310), BBa_Z0253 (SEQ ID NO: 311), BBa_J64998 (SEQ ID NO: 312), BBa_K112706 (SEQ ID NO: 313), BBa_K112707 (SEQ ID NO: 314). Exemplary promoters from yeast and various eukaryotes include BBa_I766557 (SEQ ID NO: 315), BBa_J63005 (SEQ ID NO: 316), BBa_K105027 (SEQ ID NO: 317), BBa_K105028 (SEQ ID NO: 318), BBa_K105029 (SEQ ID NO: 319), BBa_K105030 (SEQ ID NO: 320), BBa_K105031 (SEQ ID NO: 321), BBa_K122000), SEQ ID NO: 322), BBa_K124000 (SEQ ID NO: 323), BBa_K124002 (SEQ ID NO: 324), BBa_K319005 (SEQ ID NO: 325), BBa_M31201 (SEQ ID NO: 326), BBa_I766555 (SEQ ID NO: 327), BBa_I766556 (SEQ ID NO: 328), BBa_I712004 (SEQ ID NO: 329), and BBa_K076017 (SEQ ID NO: 330).

[0292] Additional exemplary promoters are listed in Table 8.

TABLE 8
Exemplary constitutive promoters

| Name | Description |
|---|---|
| Plpp | The Plpp promoter is a natural promoter taken from the Nissle |
| SEQ ID NO: 331 | genome. In situ it is used to drive production of lpp, which is known to |
| | be the most abundant protein in the cell. Also, in some previous |
| | RNAseq experiments I was able to confirm that the lpp mRNA is one of |
| | the most abundant mRNA in Nissle during exponential growth. |
| PapFAB46 | See, e.g., Kosuri, S., Goodman, D. B. & Cambray, G. Composability of |
| SEQ ID NO: 332 | regulatory sequences controlling transcription and translation in |
| | Escherichia coli. in 1-20 (2013). doi:10.1073/pnas. |
| PJ23101 + UP | UP element helps recruit RNA polymerase |
| element | |
| SEQ ID NO: 333 | (ggaaaatttttttaaaaaaaaaac (SEQ ID NO: 1087)) |
| PJ23107 + UP | UP element helps recruit RNA polymerase |
| element | |
| SEQ ID NO: 334 | (ggaaaatttttttaaaaaaaaaac (SEQ ID NO: 1087)) |
| PSYN23119 | UP element at 5′ end; consensus -10 region is TATAAT; the consensus |
| SEQ ID NO: 335 | -35 is TTGACA; the extended -10 region is generally TGNTATAAT |
| | (TGGTATAAT in this sequence) |

[0293] Bacterial constitutive promoters are known in the art. In some embodiments, the 1 constitutive promoter is at least about 80%, 85%, 90%, 95%, or 99% homologous to the sequence of any one of SEQ ID NOs: 187-343.

### Ribosome Binding Sites

[0294] In some embodiments, ribosome binding sites are added, switched out or replaced. By testing a few ribosome binding sites, expression levels can be fine-tuned to the desired level. Various RBS are suitable for prokaryotic expression and can be used to achieve the desired expression levels (See, e.g., Registry of standard biological parts). Exemplary ribosome binding sites include those derived from Master sequence SEQ ID NO: 336. Non limiting examples of such ribosome binding sites include BBa_J61100, BBa_J61101, BBa_J61102, BBa_J61103, BBa_J61104, BBa_J61105, BBa_J61106, BBa_J61107, BBa_J61108, BBa_J61109, BBa_J61110, BBa_J61111, BBa_J61112, BBa_J61113, BBa_J61114, BBa_J61115, BBa_J61116, BBa_J61117, BBa_J61118, BBa_J61119, BBa_J61120, BBa_J61121, BBa_J61122, BBa_J61123, BBa_J61124, BBa_J61125, BBa_J61126, BBa_J61127, BBa_J61128, BBa_J6112, BBa_J61130, BBa_J61131, BBa_J61132, BBa_J61133, BBa_J61134, BBa_J61135, BBa_J61136, BBa_J61137, BBa_J61138, BBa_J61139, BBa_B0029, BBa_B0030, BBa_B0031, BBa_B0032, BBa_B0033, BBa_B0034, BBa_B0035, and BBa_B0064 (SEQ ID NO: 336-384).

### Nucleic Acids

[0295] In some embodiments, the disclosure provides novel nucleic acids for producing and secreting EGF. In some embodiments, the nucleic acid encodes one or more EGF or EGF fusion protein polypeptides. Thus, in some embodiments, the nucleic acid comprises gene sequence(s) encoding one or more EGF or EGF fusion protein polypeptides. In some embodiments, the one or more EGF or EGF fusion protein polypeptide(s) comprises a polypeptide sequence selected from any of Sequences A, C, D, E, F, G, H, I, J, K, or L a functional fragment and/or variant thereof, or a polypeptide having at least 80%, 85%, 90%, 95%, 96%, 97%, 98%, or 99% identity thereof, e.g., as assessed by an alignment algorithm such as NCBI BLAST. In some embodiments, the nucleic acid comprises one or more EGF or EGF fusion protein cassettes. In some embodiments, the EGF fusion nucleic acid comprises a polynucleotide selected from Sequences B, N, O, P, Q, R, S, T U, V, or W (see below), a functional fragment and/or variant thereof, or a polynucleotide having at least 80%, 85%, 90%, 95%, 96%, 97%, 98%, or 99% identity thereof, e.g., as assessed by an alignment algorithm such as NCBI BLAST.

Sequence N (PelB-EGF):
atgaaatatctgttgcccacggctgccgcgggtctgctgctgctggcagc
gcaaccggctatggcaAATAGTGACAGCGAATGTCCGCTGTCGCACGATG
GTTATTGCCTTCATGATGGGGTGTGCATGTACATTGAGGCATTGGACAAA
TATGCCTGCAACTGTGTTGTCGGCTATATCGGCGAACGGTGTCAGTACCG
TGATCTGAAATGGTGGGAATTACGCTAA
Sequence O (PhoA-EGF):
atgaaacaaagcactattgcactggcactcttaccgttactgtttacccc
tgtgacaaaagcgAATAGTGACAGCGAATGTCCGCTGTCGCACGATGGTT
ATTGCCTTCATGATGGGGTGTGCATGTACATTGAGGCATTGGACAAATAT
GCCTGCAACTGTGTTGTCGGCTATATCGGCGAACGGTGTCAGTACCGTGA
TCTGAAATGGTGGGAATTACGCTAA
Sequence P (OmpA-EGF):
ATGAAGAAAACCGCAATTGCAATCGCCGTCGCTCTGGCGGGGTTCGCTAC
GGTCGCCCAAGCCAATAGTGACAGCGAATGTCCGCTGTCGCACGATGGTT
ATTGCCTTCATGATGGGGTGTGCATGTACATTGAGGCATTGGACAAATAT
GCCTGCAACTGTGTTGTCGGCTATATCGGCGAACGGTGTCAGTACCGTGA
TCTGAAATGGTGGGAATTACGCTAA
Sequence Q (EGF-LARD3):
ATGAATAGTGACAGCGAATGTCCGCTGTCGCACGATGGTTATTGCCTTCA
TGATGGGGTGTGCATGTACATTGAGGCATTGGACAAATATGCCTGCAACT
GTGTTGTCGGCTATATCGGCGAACGGTGTCAGTACCGTGATCTGAAATGG
TGGGAATTACGCATTGAGGGCCGGggttctgacggtaatgatcttatcca
aggcggtaagggcgcggacttcattgaaggggcaaaggtaatgatacaat
ccgcgataactccggtcacaacacctttttgttctcagggcattttggtc
aggatcgtattataggatatcagccgaccgatcggctggtattccagggc
gctgacggcagcacggatctgcgcgaccatgcgaaagccgttggagcaga
tacggtgctgagttttggcgccgattoggttactctcgtcggggtggggt
taggaggcctgtggagcgagggtgtgctgattagttaa
Sequence R (EGF-HylA):
ATGAATAGTGACAGCGAATGTCCGCTGTCGCACGATGGTTATTGCCTTCA
TGATGGGGTGTGCATGTACATTGAGGCATTGGACAAATATGCCTGCAACT
GTGTTGTCGGCTATATCGGCGAACGGTGTCAGTACCGTGATCTGAAATGG
TGGGAATTACGCtcaacttatgggagccaggacaatcttaatccattaat
taatgaaatcagcaaaatcatttcagctgcaggtaacttcgatgttaagg
aggaaagatctgccgcttctttattgcagttgtccggtaatgccagtgat
ttttcatatggacggaactcaataactttgacagcatcagcataa

[0296] In some embodiments, the nucleic acid comprises gene sequence encoding a human EGF polypeptide linked to an FNR-responsive promoter. In certain embodiments, the human EGF polypeptide has at least about 80%, 85%, 90%, 95%, or 99% identity with Sequence A (EGF). In some embodiments, the FNR-responsive promoter is at least about 80%, 85%, 90%, 95%, or 99% homologous to the sequence of any one of SEQ ID NO: 151-167. In some embodiments, the human EGF polypeptide has at least about 85%, 86%, 87%, 88%, 89%, 90%, 91%, 92%, 93%, 94%, 95%, 96%, 97%, 98%, or 99% identity with Sequence A. In some embodiments, the FNR-responsive promoter has at least about 85%, 86%, 87%, 88%, 89%, 90%, 91%, 92%, 93%, 94%, 95%, 96%, 97%, 98%, or 99% identity with the sequence of any one of SEQ ID NO: 151-167. In some specific embodiments, the human EGF polypeptide comprises Sequence A. In other specific embodiments, the human EGF polypeptide consists of Sequence A. In some embodiments, the nucleic acid comprises a gene sequence linked to an FNR-responsive element.

[0297] In some embodiments, the nucleic acid comprises gene sequence encoding a human EGF polypeptide linked to a temperature sensitive promoter construct that further comprises a gene encoding mutant cI857 repressor. In certain embodiments, the human EGF polypeptide has at least about 80%, 85%, 90%, 95%, or 99% identity with Sequence A (EGF). In some embodiments, the temperature sensitive promoter construct comprises a gene encoding mutant cI857 repressor that is at least about 80%, 85%, 90%, 95%, or 99% homologous to the sequence of any one of SEQ ID NO: 183-185. In some embodiments, the human EGF polypeptide has at least about 85%, 86%, 87%, 88%, 89%, 90%, 91%, 92%, 93%, 94%, 95%, 96%, 97%, 98%, or 99% identity with Sequence A. In some embodiments, the temperature sensitive promoter construct comprises a gene encoding mutant cI857 repressor that has at least about 85%, 86%, 87%, 88%, 89%, 90%, 91%, 92%, 93%, 94%, 95%, 96%, 97%, 98%, or 99% identity with the sequence of any one of SEQ ID NO: 183-185. In some specific embodiments, the human EGF polypeptide comprises Sequence A. In other specific embodiments, the human EGF polypeptide consists of Sequence A. In some embodiments, the nucleic acid comprises a gene sequence linked to a temperature sensitive element.

[0298] In certain embodiments, the nucleic acid comprising the human EGF gene sequence has at least about 80%, 85%, 90%, 95%, or 99% identity with Sequence B (EGF) linked to an FNR-responsive element. In some embodiments, the nucleic acid comprising the human EGF gene sequence has at least about 85%, 86%, 87%, 88%, 89%, 90%, 91%, 92%, 93%, 94%, 95%, 96%, 97%, 98%, or 99% identity with Sequence B. In some embodiments, the FNR-responsive promoter has at least about 85%, 86%, 87%, 88%, 89%, 90%, 91%, 92%, 93%, 94%, 95%, 96%, 97%, 98%, or 99% identity with the sequence of any one of SEQ ID NO: 151-167. In some specific embodiments, the nucleic acid comprising the human EGF gene sequence comprises Sequence B with an FNR-responsive element of any one of SEQ ID NO: 151-167. In other specific embodiments the nucleic acid comprising the human EGF gene sequence consists of Sequence B with an FNR-responsive element of any one of SEQ ID NO: 151-167.

[0299] In certain embodiments, the nucleic acid comprising the human EGF gene sequence has at least about 80%, 85%, 90%, 95%, or 99% identity with Sequence B (EGF) linked to a temperature sensitive promoter construct that further comprises a gene encoding mutant cI857 repressor. In some embodiments, the nucleic acid comprising the human EGF gene sequence has at least about 85%, 86%, 87%, 88%, 89%, 90%, 91%, 92%, 93%, 94%, 95%, 96%, 97%, 98%, or 99% identity with Sequence B. In some embodiments, the temperature sensitive promoter construct further comprises a gene encoding mutant cI857 repressor that has at least about 85%, 86%, 87%, 88%, 89%, 90%, 91%, 92%, 93%, 94%, 95%, 96%, 97%, 98%, or 99% identity with the sequence of any one of SEQ ID NO: 183-185. In some specific embodiments, the nucleic acid comprising the human EGF gene sequence comprises Sequence B with a temperature sensitive element of any one of SEQ ID NO: 183-185. In other specific embodiments the nucleic acid comprising the human EGF gene sequence consists of Sequence B with a temperature sensitive element of any one of SEQ ID NO: 183-185.

[0300] In some embodiments, the nucleic acid comprises a gene sequence encoding a PelB polypeptide. In certain embodiments, the PelB polypeptide has at least about 80%, 85%, 90%, 95%, or 99% identity with Sequence C (PelB). In some embodiments, the PelB polypeptide has at least about 85%, 86%, 87%, 88%, 89%, 90%, 91%, 92%, 93%, 94%, 95%, 96%, 97%, 98%, or 99% identity with Sequence C. In some specific embodiments, the PelB polypeptide comprises Sequence C. In other specific embodiments, the PelB polypeptide consists of Sequence C. In some embodiments, the nucleic acid comprises a gene sequence. In certain embodiments, the nucleic acid comprising the PelB gene sequence has at least about 80%, 85%, 90%, 95%, or 99% identity with Sequence S (see below). In some embodiments, the nucleic acid comprising the PelB gene sequence has at least about 85%, 86%, 87%, 88%, 89%, 90%, 91%, 92%, 93%, 94%, 95%, 96%, 97%, 98%, or 99% identity with Sequence S. In some specific embodiments, the nucleic acid comprising the PelB gene sequence comprises Sequence S. In other specific embodiments the nucleic acid comprising the PelB gene sequence consists of Sequence S.

Sequence S (PelB):
atgaaatatctgttgcccacggctgccgcgggtctgctgctgctggcag
cgcaaccggctatggca

[0301] In some embodiments, the nucleic acid comprises a gene sequence encoding a PhoA polypeptide. In certain embodiments, the PhoA polypeptide has at least about 80%, 85%, 90%, 95%, or 99% identity with Sequence D (PhoA). In some embodiments, the PhoA polypeptide has at least about 85%, 86%, 87%, 88%, 89%, 90%, 91%, 92%, 93%, 94%, 95%, 96%, 97%, 98%, or 99% identity with Sequence D. In some specific embodiments, the PhoA polypeptide comprises Sequence D. In other specific embodiments, the PhoA polypeptide consists of Sequence D. In some embodiments, the nucleic acid comprises a gene sequence. In certain embodiments, the nucleic acid comprising the PhoA gene sequence has at least about 80%, 85%, 90%, 95%, or 99% identity with Sequence T (see below). In some embodiments, the nucleic acid comprising the PhoA gene sequence has at least about 85%, 86%, 87%, 88%, 89%, 90%, 91%, 92%, 93%, 94%, 95%, 96%, 97%, 98%, or 99% identity with Sequence T. In some specific embodiments, the nucleic acid comprising the PhoA gene sequence comprises Sequence T. In other specific embodiments the nucleic acid comprising the PhoA gene sequence consists of Sequence T.

Sequence T (PhoA):
atgaaacaaagcactattgcactggcactcttaccgttactgtttaccc
ctgtgacaaaagcg

[0302] In some embodiments, the nucleic acid comprises a gene sequence encoding a OmpA polypeptide. In certain embodiments, the OmpA polypeptide has at least about 80%, 85%, 90%, 95%, or 99% identity with Sequence E (OmpA). In some embodiments, the OmpA polypeptide has at least about 85%, 86%, 87%, 88%, 89%, 90%, 91%, 92%, 93%, 94%, 95%, 96%, 97%, 98%, or 99% identity with Sequence E. In some specific embodiments, the OmpA polypeptide comprises Sequence E. In other specific embodiments, the OmpA polypeptide consists of Sequence E. In some embodiments, the nucleic acid comprises a gene sequence. In certain embodiments, the nucleic acid comprising the OmpA gene sequence has at least about 80%, 85%, 90%, 95%, or 99% identity with Sequence U (See below). In some embodiments, the nucleic acid comprising the OmpA gene sequence has at least about 85%, 86%, 87%, 88%, 89%, 90%, 91%, 92%, 93%, 94%, 95%, 96%, 97%, 98%, or 99% identity with Sequence U. In some specific embodiments, the nucleic acid comprising the OmpA gene sequence comprises Sequence U. In other specific embodiments the nucleic acid comprising the OmpA gene sequence consists of Sequence U.

Sequence U (OmpA):
ATGAAGAAAACCGCAATTGCAATCGCCGTCGCTCTGGCGGGGTTCGCTA
CGGTCGCCCAAGCC

[0303] In some embodiments, the nucleic acid comprises a gene sequence encoding a LARD3 polypeptide. In certain embodiments, the LARD3 polypeptide has at least about 80%, 85%, 90%, 95%, or 99% identity with Sequence F (LARD3). In some embodiments, the LARD3 polypeptide has at least about 85%, 86%, 87%, 88%, 89%, 90%, 91%, 92%, 93%, 94%, 95%, 96%, 97%, 98%, or 99% identity with Sequence F. In some specific embodiments, the LARD3 polypeptide comprises Sequence F. In other specific embodiments, the LARD3 polypeptide consists of Sequence F. In some embodiments, the nucleic acid comprises a gene sequence. In certain embodiments, the nucleic acid comprising the LARD3 gene sequence has at least about 80%, 85%, 90%, 95%, or 99% identity with Sequence V (See below). In some embodiments, the nucleic acid comprising the LARD3 gene sequence has at least about 85%, 86%, 87%, 88%, 89%, 90%, 91%, 92%, 93%, 94%, 95%, 96%, 97%, 98%, or 99% identity with Sequence V. In some specific embodiments, the nucleic acid comprising the LARD3 gene sequence comprises Sequence V. In other specific embodiments the nucleic acid comprising the LARD3 gene sequence consists of Sequence V.

Sequence V (LARD3):
attgagggccggggttctgacggtaatgatcttatccaaggcggtaagg
gcgcggacttcattgaaggcggcaaaggtaatgatacaatccgcgataa
ctccggtcacaacacctttttgttctcagggcattttggtcaggatcgt
attataggatatcagccgaccgatcggctggtattccagggcgctgacg
gcagcacggatctgcgcgaccatgcgaaagccgttggagcagatacggt
gctgagttttggcgccgattcggttactctcgtcggggtggggttagga
ggcctgtggagcgagggtgtgctgattagttaa

[0304] In some embodiments, the nucleic acid comprises a gene sequence encoding a HylA polypeptide. In certain embodiments, the HylA polypeptide has at least about 80%, 85%, 90%, 95%, or 99% identity with Sequence G (HylA). In some embodiments, the HylA polypeptide has at least about 85%, 86%, 87%, 88%, 89%, 90%, 91%, 92%, 93%, 94%, 95%, 96%, 97%, 98%, or 99% identity with Sequence G. In some specific embodiments, the HylA polypeptide comprises Sequence G. In other specific embodiments, the HylA polypeptide consists of Sequence G. In some embodiments, the nucleic acid comprises a gene sequence. In certain embodiments, the nucleic acid comprising the HylA gene sequence has at least about 80%, 85%, 90%, 95%, or 99% identity with Sequence W (See below). In some embodiments, the nucleic acid comprising the HylA gene sequence has at least about 85%, 86%, 87%, 88%, 89%, 90%, 91%, 92%, 93%, 94%, 95%, 96%, 97%, 98%, or 99% identity with Sequence W. In some specific embodiments, the nucleic acid comprising the HylA gene sequence comprises Sequence W. In other specific embodiments the nucleic acid comprising the HylA gene sequence consists of Sequence W.

Sequence W (HylA):
tcaacttatgggagccaggacaatcttaatccattaattaatgaaatca
gcaaaatcatttcagctgcaggtaacttcgatgttaaggaggaaagatc
tgccgcttctttattgcagttgtccggtaatgccagtgatttttcatat
ggacggaactcaataactttgacagcatcagcataa

[0305] In some embodiments, the nucleic acid comprises a gene sequence encoding an ATP-binding cassette transporter polypeptide. In certain embodiments, the ATP-binding cassette transporter polypeptide has at least about 80%, 85%, 90%, 95%, or 99% identity with Sequence M.1, M.2, and/or M.3. In some embodiments, the ATP-binding cassette transporter polypeptide has at least about 85%, 86%, 87%, 88%, 89%, 90%, 91%, 92%, 93%, 94%, 95%, 96%, 97%, 98%, or 99% identity with Sequence M.1, M.2, and/or M.3. In some specific embodiments, the HylA polypeptide comprises Sequence G. In other specific embodiments, the HylA polypeptide consists of Sequence G. In some embodiments, the nucleic acid comprises a gene sequence. In certain embodiments, the nucleic acid comprising the ATP-binding cassette transporter gene sequence has at least about 80%, 85%, 90%, 95%, or 99% identity with Sequence X.1, X.2, and/or X.3 (See below). In some embodiments, the nucleic acid comprising the ATP-binding cassette transporter gene sequence has at least about 85%, 86%, 87%, 88%, 89%, 90%, 91%, 92%, 93%, 94%, 95%, 96%, 97%, 98%, or 99% identity with Sequence X.1, X.2, and/or X.3. In some specific embodiments, the nucleic acid comprising the ATP-binding cassette transporter gene sequence comprises Sequence X.1, X.2, and/or X.3. In other specific embodiments the nucleic acid comprising the ATP-binding cassette transporter gene sequence consists of Sequence X.1, X.2, and/or X.3.

Sequence X.1 (prtD):
atgaatgcttcctctgagcgagatcgttcgcttttcggcgtgctgagacagttccgccgcagtttctggagcgtcgggattttcagcg
ccgtcatcaacgtgctgatgttagcgccttcggtatatatgctgcaggtgtatgaccgggtgctggcatcaggtaacggtatcaccctgctcatg
ctgactttactgatggcgggactgtgcgcatttatgggcgcgttagagtgggttcgtagtctgcttgtagtgaggctgggtacccgtatcgatct
cgcgctcaatcaggatgtctttaatgcggcatttgcccgtaatctggaggcaggtgatggccgcgccgggctggcgctgaccgacttaacgctg
cttcgccagttcatcaccggcaacgcgcttttcgccttcttcgatgtgccatggtttccgctgtttctactggttctgtttttgctgcacccatg
gctgggaatgctcgcgctgggaggcactgtggtgctagttgcgttagcctggctgaaccagcacctgaccaaccaaccgcttgctgaagccaatc
agcaatcacaacaggcgacccacttagctgacgctcagttgcgcaatgccgacgttattgaagcaatggggatgctgggtaacctgcgtcgacg
ctggcttgcgcgtcattaccgttttatttccctgcagaatcttgccagcgagcgtgccgccgcggttggcggtgcgtccaaatacagccgtattg
cgttgcaatcattgatgctggggctgggagcactgctggcgatcgacggtaagatcacaccagggatgatgatcgccggtagcattttagttgg
tcgggtactgagtccgatcgatcagttaataggggtatggaaacagtggagctctgcgcgcattgcctggcaacgcttaacccggctgatcgc
cgcatatccgccgcgcccggcggcaatggctttacctgcgccggaagggcatctcagtgtggaacaggtctcacttcgcacggtgcaggga
aatacccgactgcaaaacatacatttttcgttgcaggctggcgaaacgctggtcattctcggcgcatctggttccggcaaatcctcgctggcgcg
tttgctggtcggcgcgcagagtccgacacaaggtaaagttcgtctggatggcgctgatttgaatcaggtcgacaaaaacacgtttggtccgacc
attggttatttgccccaggacgtgcagttatttaagggctcgctcgctgaaaacatcgcacgttttggcgatgccgatccggaaaaagttgtagc
ggcagcaaaacttgcgggggtacatgaactcattctgtctctacccaacggttatgacaccgaattgggtgatggcggcggcggtttgtctggc
ggccagagacagcgtatcggtctggcgcgcgctatgtacggcgatccttgtctgctgattctggatgaaccaaacgccagccttgacagogaa
ggcgatcaagccctaatgcaggcgattgtcgcattgcagaaacgcggtgccactgttgtgttgattactcatcgcccggctttaacaacgctgg
ctcaaaagattctgattctccacgagggccaacaacagcgtatgggactggcgcgcgatgtgctgacagaactgcaacagcgcagcgcagc
caatcaggcacggatgaaccccacggccgcaatgcctcaataa
Sequence X.2 (prtE):
atgacaggcatggatataaccactcaggatgaattaaacgaagcagcaatgcgcgatcgcgcttcacgtgatgaagagcgcgca
ttacggctgggctggtggctggtgctcgcgggtttcggtggttttctgctgtgggcattactggcgccgttagataaaggggtggcggtgcaag
gcaacgtggtggtttcaggcaatcgtaaggtgatccaacacatgcagggcggcattgtcgatcggattcaggtgaaagacggcgaccgcgtt
gccgcaggtcaggttctcctgacgctgaatgcggtagatgcccgtaccaccagcgaagggctgggttcccaatatgatcaattaattgctcgc
gaagccagactgctggcggaacagcgcaatcaatcgagtctggcggctacgccacgactggcgcaggcgcgtcagagaccggaaatggc
tgccattattgcgttgcaggaagatctacttcgtagccgtcagcaatcgctaaaactggaaatagatggagtccgcgccagcatcgatggactg
gagacttcgcttggcgcattgcaaaaggtgatgagttctaaacagtccgagcaggcaacgttgtctcagcaattacagggcctccggccgctg
gcggcggataactatgttccgcgtaacaagatgctggaaactgagcgtttgtttgctcaggtctctggcgaactggcccagacaagcggcgag
gtagggcgaacccgacgtgatattcagcagcaaaaattgaggatcgcccagcgtcagcaggaatacgacaaagaggtcaacagcgaattgt
ccgacgtacaagccaaactgaatgaggttatcagtcagcgcgagaaagcggatttcaatctggccaacgttcaggtccgtgcacctgttgccg
gcaccgtggtggatatgaagatcttcaccgaaggtggtgtgatcgcacccgggcaggtcatgatggacatcgttcccgaagaccaaccgctg
cttgttgatgggcgcattcctgtggaaatggtggacaaagtatggtcaggtcttccagtggaactccaattcaccgcgttttcacaaagcacaac
gccgcgtgtaccgggaacggtcaccctgctttccgctgaccggctggtagacgaaaaagacggcactccgtactacggtctccgcattcagg
tgagcgaagaaggcaaacgcagtttgcatggtctggaaattaaaccaggtatgccggttcaggggtttgtccgcaccggagagcgttcgtttat
caattatctgtttaaacctctgatggatcgcatgcatcttgcgttaacggaagagtaa
Sequence X.3 (prtF):
atgcgaaggaaagcggtactactgacggttgttttatctctgtcatgcggcagcgcccaggcgatgggcctcctggatgcatggg
aacttgcacttogtaatgacgcacaactgcgggcggccggtttcgaacgagacgccggtcaggaagaggtggcgatcggtcgcgctgggtt
gctgccatcgctgcaatatacctatggcgcaaattacagtcattccaaggtgacgcaacgcgatcggacgctgaataacacgactaaacgtga
ctacgataactacgtatctacgcttacgctgcgtcagccgctgctggactatgcagcctgggcgcgctatcagcagggcgtcacccgcaaact
tatggctgatcagaggtttcgtgatcgtagtcaggacctgatggtgcgtttgtaccagtcctggagcgaagcattgctggcgcaggagaagctt
atgctcctcgatgcgcagcgccgtgcctatcaggagcagttagcgctgaaccgtcgcttattggctgcgggggaaggaactcaaacagacct
gcgggaaacggaagcacgttacaccgtcactgaagcccaacgtatcgaacaggaagataccctggatgccgctatgacagatctcgaaaac
atgatgggttcgccgctacaaattcaggatctgagtccacttgcgctggatacgttgccggataacgtaaccgaaaatcgctcgttatcacaatg
gcgcgaactgactgtgcggcacaatgcaaagctcgcggttcaacgtgaaaacgtcgattacagccgctatgaaattgagcgtaacagagccg
gccatctgcccacactggacctcgtggcgtccacccgcaacagcttgtccgaatctgaatataactacaaccagaaatacgacacccagacc
gttggtttacaggtgagagtgccgctgtatagcggcggcgccgtttcggcatcaatgcgtcaggcagcggcggaataccagcaaagtcaggc
ggagctggataaccagacccgtcagacctttgcggaattacgccgtcagttcaacctgtgtgctaatggggccgcaaaaatccgagcctggc
agatgagcgtggcagctgctgaggaagcgatccgcgcgacgcggcaaagcgtcgccggcggcgagcgcattaatctggacgttctgatgg
cggaacaggagtggtataacgcccgccgcgagctgacagaagtcaaatatcgctggttacaggcctggctgaatttgcgttataccgccgga
acactgaatgagcaagatatgatgcaattggctgcctggtttcaatctgcgcctgtaattaataaaactggtataaataaaaccggaattaacgc
agctaccggtaataaaactaattaa

[0306] In some embodiments, the nucleic acid comprises gene encoding a human EGF polypeptide fused to a PelB secretion tag, optionally wherein the gene is operably linked to an FNR-inducible promoter. In certain embodiments, the human EGF fusion protein has at least about 80%, 85%, 90%, 95%, or 99% identity with Sequence H (PelB-EGF). In some embodiments, the human EGF fusion protein has at least about 85%, 86%, 87%, 88%, 89%, 90%, 91%, 92%, 93%, 94%, 95%, 96%, 97%, 98%, or 99% identity with Sequence H. In some specific embodiments, the human EGF fusion protein comprises Sequence H. In some embodiments, the gene encoding the fusion is operably linked to an FNR-responsive promoter having at least about 80%, 85%, 90%, 95%, or 99% homologous to the sequence of any one of SEQ ID NO: 151-167. In some embodiments, the FNR-responsive promoter has at least about 85%, 86%, 87%, 88%, 89%, 90%, 91%, 92%, 93%, 94%, 95%, 96%, 97%, 98%, or 99% identity with the sequence of any one of SEQ ID NO: 151-167.

[0307] In some embodiments, the nucleic acid comprises gene encoding a human EGF polypeptide fused to a PelB secretion tag, optionally wherein the gene is operably linked to a temperature sensitive promoter construct that further comprises a gene encoding mutant cI857 repressor. In certain embodiments, the human EGF fusion protein has at least about 80%, 85%, 90%, 95%, or 99% identity with Sequence H (PelB-EGF). In some embodiments, the human EGF fusion protein has at least about 85%, 86%, 87%, 88%, 89%, 90%, 91%, 92%, 93%, 94%, 95%, 96%, 97%, 98%, or 99% identity with Sequence H. In some specific embodiments, the human EGF fusion protein comprises Sequence H. In some embodiments, the gene encoding the fusion is operably linked to a temperature sensitive promoter construct that further comprises a gene encoding mutant cI857 repressor that having at least about 80%, 85%, 90%, 95%, or 99% homologous to the sequence of any one of SEQ ID NO: 183-185. In some embodiments, the temperature sensitive promoter construct that further comprises a gene encoding mutant cI857 repressor that has at least about 85%, 86%, 87%, 88%, 89%, 90%, 91%, 92%, 93%, 94%, 95%, 96%, 97%, 98%, or 99% identity with the sequence of any one of SEQ ID NO: 183-185.

[0308] In some embodiments, the nucleic acid comprises gene encoding a human EGF polypeptide fused to a PhoA secretion tag, optionally wherein the gene is operably linked to an FNR-inducible promoter. In certain embodiments, the human EGF fusion protein has at least about 80%, 85%, 90%, 95%, or 99% identity with Sequence I (PhoA-EGF). In some embodiments, the human EGF fusion protein has at least about 85%, 86%, 87%, 88%, 89%, 90%, 91%, 92%, 93%, 94%, 95%, 96%, 97%, 98%, or 99% identity with Sequence I. In some specific embodiments, the human EGF fusion protein comprises Sequence I. In some embodiments, the gene encoding the fusion is operably linked to an FNR-responsive promoter having at least about 80%, 85%, 90%, 95%, or 99% homologous to the sequence of any one of SEQ ID NO: 151-167. In some embodiments, the FNR-responsive promoter has at least about 85%, 86%, 87%, 88%, 89%, 90%, 91%, 92%, 93%, 94%, 95%, 96%, 97%, 98%, or 99% identity with the sequence of any one of SEQ ID NO: 151-167.

[0309] In some embodiments, the nucleic acid comprises gene encoding a human EGF polypeptide fused to a PhoA secretion tag, optionally wherein the gene is operably linked to a temperature sensitive promoter construct that further comprises a gene encoding mutant cI857 repressor. In certain embodiments, the human EGF fusion protein has at least about 80%, 85%, 90%, 95%, or 99% identity with Sequence I (PhoA-EGF). In some embodiments, the human EGF fusion protein has at least about 85%, 86%, 87%, 88%, 89%, 90%, 91%, 92%, 93%, 94%, 95%, 96%, 97%, 98%, or 99% identity with Sequence I. In some specific embodiments, the human EGF fusion protein comprises Sequence I. In some embodiments, the gene encoding the fusion is operably linked to a temperature sensitive promoter construct that further comprises a gene encoding mutant cI857 repressor that having at least about 80%, 85%, 90%, 95%, or 99% homologous to the sequence of any one of SEQ ID NO: 183-185. In some embodiments, the Temperature sensitive promoter construct that further comprises a gene encoding mutant cI857 repressor that has at least about 85%, 86%, 87%, 88%, 89%, 90%, 91%, 92%, 93%, 94%, 95%, 96%, 97%, 98%, or 99% identity with the sequence of any one of SEQ ID NO: 183-185.

[0310] In some embodiments, the nucleic acid comprises gene encoding a human EGF polypeptide fused to a OmpA secretion tag, optionally wherein the gene is operably linked to an FNR-inducible promoter. In certain embodiments, the human EGF fusion protein has at least about 80%, 85%, 90%, 95%, or 99% identity with Sequence J (OmpA-EGF). In some embodiments, the human EGF fusion protein has at least about 85%, 86%, 87%, 88%, 89%, 90%, 91%, 92%, 93%, 94%, 95%, 96%, 97%, 98%, or 99% identity with Sequence J. In some specific embodiments, the human EGF fusion protein comprises Sequence J. In some embodiments, the gene encoding the fusion is operably linked to an FNR-responsive promoter having at least about 80%, 85%, 90%, 95%, or 99% homologous to the sequence of any one of SEQ ID NO: 151-167. In some embodiments, the FNR-responsive promoter has at least about 85%, 86%, 87%, 88%, 89%, 90%, 91%, 92%, 93%, 94%, 95%, 96%, 97%, 98%, or 99% identity with the sequence of any one of SEQ ID NO: 151-167.

[0311] In some embodiments, the nucleic acid comprises a gene encoding a human EGF polypeptide fused to a OmpA secretion tag, optionally wherein the gene is operably linked to an temperature sensitive promoter construct that further comprises a gene encoding mutant cI857 repressor. In certain embodiments, the human EGF fusion protein has at least about 80%, 85%, 90%, 95%, or 99% identity with Sequence J (OmpA-EGF). In some embodiments, the human EGF fusion protein has at least about 85%, 86%, 87%, 88%, 89%, 90%, 91%, 92%, 93%, 94%, 95%, 96%, 97%, 98%, or 99% identity with Sequence J. In some specific embodiments, the human EGF fusion protein comprises Sequence J. In some embodiments, the gene encoding the fusion is operably linked to a temperature sensitive promoter construct that further comprises a gene encoding mutant cI857 repressor that having at least about 80%, 85%, 90%, 95%, or 99% homologous to the sequence of any one of SEQ ID NO: 183-185. In some embodiments, the temperature sensitive promoter construct that further comprises a gene encoding mutant cI857 repressor that has at least about 85%, 86%, 87%, 88%, 89%, 90%, 91%, 92%, 93%, 94%, 95%, 96%, 97%, 98%, or 99% identity with the sequence of any one of SEQ ID NO: 183-185.

[0312] In some embodiments, the nucleic acid comprises gene encoding a human EGF polypeptide fused to a LARD3 secretion tag, optionally wherein the gene is operably linked to an FNR-inducible promoter. In certain embodiments, the human EGF fusion protein has at least about 80%, 85%, 90%, 95%, or 99% identity with Sequence K (EGF-LARD3). In some embodiments, the human EGF fusion protein has at least about 85%, 86%, 87%, 88%, 89%, 90%, 91%, 92%, 93%, 94%, 95%, 96%, 97%, 98%, or 99% identity with Sequence K. In some specific embodiments, the human EGF fusion protein comprises Sequence K. In some embodiments, the gene encoding the fusion is operably linked to an FNR-responsive promoter having at least about 80%, 85%, 90%, 95%, or 99% homologous to the sequence of any one of SEQ ID NO: 151-167. In some embodiments, the FNR-responsive promoter has at least about 85%, 86%, 87%, 88%, 89%, 90%, 91%, 92%, 93%, 94%, 95%, 96%, 97%, 98%, or 99% identity with the sequence of any one of SEQ ID NO: 151-167.

[0313] In some embodiments, the nucleic acid comprises a gene encoding a human EGF polypeptide fused to a LARD3 secretion tag, optionally wherein the gene is operably linked to an temperature sensitive promoter construct that further comprises a gene encoding mutant cI857 repressor. In certain embodiments, the human EGF fusion protein has at least about 80%, 85%, 90%, 95%, or 99% identity with Sequence K (EGF-LARD3). In some embodiments, the human EGF fusion protein has at least about 85%, 86%, 87%, 88%, 89%, 90%, 91%, 92%, 93%, 94%, 95%, 96%, 97%, 98%, or 99% identity with Sequence K. In some specific embodiments, the human EGF fusion protein comprises Sequence K. In some embodiments, the gene encoding the fusion is operably linked to a temperature sensitive promoter construct that further comprises a gene encoding mutant cI857 repressor that having at least about 80%, 85%, 90%, 95%, or 99% homologous to the sequence of any one of SEQ ID NO: 183-185. In some embodiments, the temperature sensitive promoter construct that further comprises a gene encoding mutant cI857 repressor that has at least about 85%, 86%, 87%, 88%, 89%, 90%, 91%, 92%, 93%, 94%, 95%, 96%, 97%, 98%, or 99% identity with the sequence of any one of SEQ ID NO: 183-185.

[0314] In some embodiments, the nucleic acid comprises gene encoding a human EGF polypeptide fused to a HylA secretion tag, optionally wherein the gene is operably linked to an FNR-inducible promoter. In certain embodiments, the human EGF fusion protein has at least about 80%, 85%, 90%, 95%, or 99% identity with Sequence L (EGF-HylA). In some embodiments, the human EGF fusion protein has at least about 85%, 86%, 87%, 88%, 89%, 90%, 91%, 92%, 93%, 94%, 95%, 96%, 97%, 98%, or 99% identity with Sequence L. In some specific embodiments, the human EGF fusion protein comprises Sequence L. In some embodiments, the gene encoding the fusion is operably linked to an FNR-responsive promoter having at least about 80%, 85%, 90%, 95%, or 99% homologous to the sequence of any one of SEQ ID NO: 151-167. In some embodiments, the FNR-responsive promoter has at least about 85%, 86%, 87%, 88%, 89%, 90%, 91%, 92%, 93%, 94%, 95%, 96%, 97%, 98%, or 99% identity with the sequence of any one of SEQ ID NO: 151-167.

[0315] In some embodiments, the nucleic acid comprises a gene encoding a human EGF polypeptide fused to a HylA secretion tag, optionally wherein the gene is operably linked to a temperature sensitive promoter construct that further comprises a gene encoding mutant cI857 repressor. In certain embodiments, the human EGF fusion protein has at least about 80%, 85%, 90%, 95%, or 99% identity with Sequence L (EGF-HylA). In some embodiments, the human EGF fusion protein has at least about 85%, 86%, 87%, 88%, 89%, 90%, 91%, 92%, 93%, 94%, 95%, 96%, 97%, 98%, or 99% identity with Sequence L. In some specific embodiments, the human EGF fusion protein comprises Sequence L. In some embodiments, the gene encoding the fusion is operably linked to a temperature sensitive promoter construct that further comprises a gene encoding mutant cI857 repressor that having at least about 80%, 85%, 90%, 95%, or 99% homologous to the sequence of any one of SEQ ID NO: 183-185. In some embodiments, the temperature sensitive promoter construct that further comprises a gene encoding mutant cI857 repressor that has at least about 85%, 86%, 87%, 88%, 89%, 90%, 91%, 92%, 93%, 94%, 95%, 96%, 97%, 98%, or 99% identity with the sequence of any one of SEQ ID NO: 183-185.

[0316] In some embodiments, the nucleic acid comprises gene sequence encoding a Fc (IgA) polypeptide. In certain embodiments, the Fc (IgA) polypeptide has at least about 80%, 85%, 90%, 95%, or 99% identity with SEQ ID NO: 499. In some embodiments, the Fc (IgA) polypeptide has at least about 85%, 86%, 87%, 88%, 89%, 90%, 91%, 92%, 93%, 94%, 95%, 96%, 97%, 98%, or 99% identity with SEQ ID NO: 499. In some specific embodiments, the Fc (IgA) polypeptide comprises SEQ ID NO: 499. In other specific embodiments, the Fc (IgA) polypeptide consists of SEQ ID NO: 499. In some embodiments, the nucleic acid comprises a gene sequence. In certain embodiments, the nucleic acid comprising the Fc (IgA) gene sequence has at least about 80%, 85%, 90%, 95%, or 99% identity with SEQ ID NO: 527. In some embodiments, the nucleic acid comprising the Fc (IgA) gene sequence has at least about 85%, 86%, 87%, 88%, 89%, 90%, 91%, 92%, 93%, 94%, 95%, 96%, 97%, 98%, or 99% identity with SEQ ID NO: 527. In some specific embodiments, the nucleic acid comprising the Fc (IgA) gene sequence comprises SEQ ID NO: 527. In other specific embodiments the nucleic acid comprising the Fc (IgA) gene sequence consists of SEQ ID NO: 527.

[0317] In some embodiments, the nucleic acid comprises a gene sequence. In certain embodiments, the nucleic acid comprising the Fc (IgA) gene sequence has at least about 80%, 85%, 90%, 95%, or 99% identity with SEQ ID NO: 528. In some embodiments, the nucleic acid comprising the Fc (IgA) gene sequence has at least about 85%, 86%, 87%, 88%, 89%, 90%, 91%, 92%, 93%, 94%, 95%, 96%, 97%, 98%, or 99% identity with SEQ ID NO: 528. In some specific embodiments, the nucleic acid comprising the Fc (IgA) gene sequence comprises SEQ ID NO: 528. In other specific embodiments the nucleic acid comprising the Fc (IgA) gene sequence consists of SEQ ID NO: 528.

[0318] In some embodiments, the nucleic acid comprises gene sequence encoding a Linker polypeptide. In certain embodiments, the Linker polypeptide has at least about 80%, 85%, 90%, 95%, or 99% identity with SEQ ID NO: 509. In some embodiments, the Linker polypeptide has at least about 85%, 86%, 87%, 88%, 89%, 90%, 91%, 92%, 93%, 94%, 95%, 96%, 97%, 98%, or 99% identity with SEQ ID NO: 509. In some specific embodiments, the Linker polypeptide comprises SEQ ID NO: 509. In other specific embodiments, the Linker polypeptide consists of SEQ ID NO: 509. In some embodiments, the nucleic acid comprises a gene sequence. In certain embodiments, the nucleic acid comprising the LINKER gene sequence has at least about 80%, 85%, 90%, 95%, or 99% identity with SEQ ID NO: 524. In some embodiments, the nucleic acid comprising the Linker gene sequence has at least about 85%, 86%, 87%, 88%, 89%, 90%, 91%, 92%, 93%, 94%, 95%, 96%, 97%, 98%, or 99% identity with SEQ ID NO: 524. In some specific embodiments, the nucleic acid comprising the Linker gene sequence comprises SEQ ID NO: 524. In other specific embodiments the nucleic acid comprising the linker gene sequence consists of SEQ ID NO: 524. In some embodiments, the nucleic acid comprises gene sequence encoding a EGF-linker Fc (IgA) polypeptide.

[0319] In some embodiments, the nucleic acid comprises gene sequence encoding a PhoA-EGF-Fc (hIgA) polypeptide.

[0320] In some embodiments, the nucleic acid comprises gene sequence encoding a PelB-EGF-Fc (hIgA) polypeptide.

[0321] In some embodiments, the nucleic acid comprises gene sequence encoding a OmpA-EGF-Fc (hIgA) polypeptide.

[0322] In some embodiments, the nucleic acid comprises gene sequence encoding a ECOLIN 19410-EGF polypeptide.

[0323] In some embodiments, the nucleic acid comprises gene sequence encoding a ECOLIN 19410-EGF-Fc (hIgA) polypeptide.

[0324] In some embodiments, the nucleic acid comprises gene sequence encoding an EGF-LARD3-Fc (hIgA) polypeptide.

[0325] In some embodiments, the nucleic acid comprises gene sequence encoding an EGF-HylA-Fc (hIgA) polypeptide. In some embodiments, the nucleic acid comprises gene sequence encoding a mutated EGF polypeptide. In certain embodiments, the mutated EGF polypeptide has at least about 80%, 85%, 90%, 95%, or 99% identity with Sequence A. In some embodiments, the mutated EGF polypeptide has at least about 85%, Sequence A. In some specific embodiments, the mutated EGF polypeptide comprises Sequence A. In other specific embodiments, the mutated EGF polypeptide consists of Sequence A. In some embodiments, the nucleic acid comprises a gene sequence. In certain embodiments, the nucleic acid comprising the mutated EGF gene sequence has at least about 80%, 85%, 90%, 95%, or 99% identity with Sequence B. In some embodiments, the nucleic acid comprising the mutated EGF gene sequence has at least about 85%, 86%, 87%, 88%, 89%, 90%, 91%, 92%, 93%, 94%, 95%, 96%, 97%, 98%, or 99% identity with Sequence B. In some specific embodiments, the nucleic acid comprising the mutated EGF gene sequence comprises Sequence B. In other specific embodiments the nucleic acid comprising the mutated EGF gene sequence consists of Sequence B.

[0326] In some embodiments, the nucleic acid comprises gene sequence encoding a mutated EGF-linker Fc (IgA) polypeptide.

[0327] In some embodiments, the nucleic acid comprises gene sequence encoding a PhoA-mutated EGF polypeptide.

[0328] In some embodiments, the nucleic acid comprises gene sequence encoding a PhoA-mutated EGF-Fc (hIgA) polypeptide.

[0329] In some embodiments, the nucleic acid comprises gene sequence encoding a PelB-mutated EGF polypeptide.

[0330] In some embodiments, the nucleic acid comprises gene sequence encoding a PelB-mutated EGF-Fc (hIgA) polypeptide.

[0331] In some embodiments, the nucleic acid comprises gene sequence encoding a OmpA-mutated EGF polypeptide.

[0332] In some embodiments, the nucleic acid comprises gene sequence encoding a OmpA-mutated EGF-Fc (hIgA) polypeptide.

[0333] In some embodiments, the nucleic acid comprises gene sequence encoding a the ECOLIN 19410-mutated EGF polypeptide.

[0334] In some embodiments, the nucleic acid comprises gene sequence encoding an EGF-LARD3-mutated polypeptide.

[0335] In some embodiments, the nucleic acid comprises gene sequence encoding an EGF-LARD3-mutated-Fc (hIgA) polypeptide.

[0336] In some embodiments, the nucleic acid comprises gene sequence encoding an EGF-HylA-mutated polypeptide.

[0337] In some embodiments, the nucleic acid comprises gene sequence encoding an EGF-HylA-mutated-Fc (hIgA) polypeptide.

[0338] In any of the above embodiments, the nucleic acid may further comprise one or more of the following sequences: (1) promoter, (2) enhancer, (3) regulatory sequence, (4) ribosome binding site—nonlimiting examples of RBS are provided herein and include SEQ ID NO: 336-384, (5) secretion tag, non-limiting examples of secretion tags are provided herein and include SEQ ID NO: 385-394 (6) leader sequence, (7) auxotrophy, (8) antibiotic resistance.

[0339] In any of these embodiments, the nucleic acid may be functionally replaced, modified, and/or mutated in order to enhance stability and/or increase polypeptide production or secretion. In some embodiments, the nucleic acid is expressed and secreted in low-oxygen conditions, in the presence of certain molecules or metabolites, in the presence of molecules or metabolites associated with inflammation or an inflammatory response, or in the presence of some other metabolite that may or may not be present in the gut, such as arabinose. Exemplary chemical inducers are described herein. In some embodiments, the nucleic acid is directly operably linked to a first promoter. In some embodiments, the nucleic acid is indirectly operably linked to a first promoter. In one embodiment, the promoter is not operably linked with the nucleic acid in nature.

[0340] In some embodiments, nucleic acid is expressed under the control of a constitutive promoter. Non-limiting examples constitutive promoters are provided herein and include SEQ ID NO: 189-335.

[0341] In another embodiment, the nucleic acid is expressed under the control of an inducible promoter. In some embodiments, the nucleic acid is expressed under the control of a promoter that is directly or indirectly induced by exogenous environmental conditions. In one embodiment, the nucleic acid is expressed under the control of a promoter that is directly or indirectly induced by low-oxygen or anaerobic conditions, wherein expression of the nucleic acid is activated under low-oxygen or anaerobic environments, such as the environment of the mammalian gut. Inducible promoters are described in more detail infra. Non-limiting examples of low oxygen inducible promoters are provided herein and include SEQ ID NO: 151-167. Non-limiting examples of OxyR inducible promoters are provided herein and include SEQ ID NO: 168-171. Non-limiting examples of promoters regulated by chemical inducers are provided herein and include SEQ ID NO: 173-188.

[0342] In some embodiments, the nucleic acid sequence comprises an FNR-responsive promoter linked to a gene sequence encoding an EGF fusion polypeptide. In certain embodiments, the nucleic acid comprising the FNR-responsive promoter linked to a gene sequence encoding an EGF fusion polypeptide has at least about 80%, 85%, 90%, 95%, or 99% identity with Sequence Y. In some embodiments, the nucleic acid comprising the FNR-responsive promoter linked to a gene sequence encoding an EGF fusion polypeptide has at least about 85%, 86%, 87%, 88%, 89%, 90%, 91%, 92%, 93%, 94%, 95%, 96%, 97%, 98%, or 99% identity with Sequence Y. In some specific embodiments, the nucleic acid comprising the gene sequence encoding an EGF fusion polypeptide comprises Sequence H (PelB-EGF) with an FNR-responsive element of any one of SEQ ID NO: 151-167. In other specific embodiments the nucleic acid comprising the human EGF gene sequence consists of Sequence H with an FNR-responsive element of any one of SEQ ID NO: 151-167.

Sequence Y (pFNR-PelB-EGF):
tagcggagtgtatactggcttactatgttggcactgatgagggtgtcagtgaagtgcttcatgtggcaggagaaaaaaggctgcac
cggtgcgtcagcagaatatgtgatacaggatatattccgcttcctcgctcactgactcgctacgctcggtcgttcgactgcggcgagcggaaat
ggcttacgaacggggcggagatttcctggaagatgccaggaagatacttaacagggaagtgagagggccgcggcaaagccgtttttccata
ggctccgcccccctgacaagcatcacgaaatctgacgctcaaatcagtggtggcgaaacccgacaggactataaagataccaggcgtttccc
ctggcggctccctcgtgcgctctcctgttcctgcctttcggtttaccggtgtcattccgctgttatggccgcgtttgtctcattccacgcctgac
actcagttccgggtaggcagttcgctccaagctggactgtatgcacgaaccccccgttcagtccgaccgctgcgccttatccggtaactatcgtc
ttgagtccaacccggaaagacatgcaaaagcaccactggcagcagccactggtaattgatttagaggagttagtcttgaagtcatgcgccggtta
aggctaaactgaaaggacaagttttggtgactgcgctcctccaagccagttacctcggttcaaagagttggtagctcagagaaccttcgaaaaac
cgccctgcaaggcggttttttcgttttcagagcaagagattacgcgcagaccaaaacgatctcaagaagatcatcttattaaggggtctgacgct
cagtggaacggtgcaccctgcagggctagctgataaagcgttcgcgctgcattcggcagtttaattaaAGTTGTTCTTATTGGT
GGTGTTGCTTTATGGTTGCATCGTAGTAAATGGTTGTAACAAAAGCAATTTTTCCGGCT
GTCTGTATACAAAAACGCCGCAAAGTTTGAGCGAAGTCAATAAACTCTCTACCCATTC
AGGGCAATATCTCTCTTggatccaaagtgaactctagaaataattttgtttaactttaagaaggaggtatacatatgaaatatctgtt
gcccacggctgccgcgggtctgctgctgctggcagcgcaaccggctATGGCAAATAGTGACAGCGAATGTCCGC
TGTCGCACGATGGTTATTGCCTTCATGATGGGGTGTGCATGTACATTGAGGCATTGGA
CAAATATGCCTGCAACTGTGTTGTCGGCTATATCGGCGAACGGTGTCAGTACCGTGAT
CTGAAATGGTGGGAATTACGCtaaGCATGCTAATCAGCCGTGGAATTCGGTCTCaGGAG
gAACGATTGGTAAACCCGGTGaacgcatgagAAAGCCCCCGGAAGATCACCTTCCGGGGGC
TTTtttattgcgcGGACCAAAACGAAAAAAGACGCTCGAAAGCGTCTCTTTTCTGGAATTTG
GTACCGAGGcgtaatgctctgccagtgttacaaccaattaaccaattctgattagaaaaactcatcgagcatcaaatgaaactgcaattta
ttcatatcaggattatcaataccatatttttgaaaaagccgtttctgtaatgaaggagaaaactcaccgaggcagttccataggatggcaagatc
ctggtatcggtctgcgattccgactcgtccaacatcaatacaacctattaatttcccctcgtcaaaaataaggttatcaagtgagaaatcaccat
gagtgacgactgaatccggtgagaatggcaaaagcttatgcatttctttccagacttgttcaacaggccagccattacgctcgtcatcaaaatca
ctcgcatcaaccaaaccgttattcattcgtgattgcgcctgagcgagacgaaatacgcgatcgctgttaaaaggacaattacaaacaggaatcga
atgcaaccggcgcaggaacactgccagcgcatcaacaatattttcacctgaatcaggatattcttctaatacctggaatgctgttttcccgggga
tcgcagtggtgagtaaccatgcatcatcaggagtacggataaaatgcttgatggtcggaagaggcataaattccgtcagccagtttagtctgacc
atctcatctgtaacatcattggcaacgctacctttgccatgtttcagaaacaactctggcgcatcgggcttcccatacaatcgatagattgtcgc
acctgattgcccgacattatcgcgagcccatttatacccatataaatcagcatccatgttggaatttaatcgcggcctcgagcaagacgtttccc
gttgaatatggctcataacaccccttgtattactgtttatgtaagcagacagttttattgttcatgatgatatatttttatcttgtgcaatgtaa
catcagagattttgagacacaacgtggctttgttgaataaatcgaacttttgctgagttgaaggatcagatcacgcatcttcccgacaacgcaga
ccgttccgtggcaaagcaaaagttcaaaatcaccaactggtccacctacaacaaagctctcatcaaccgtggctccctcactttctggctggatg
atggggcgattcaggcctggtatgagtcagcaacaccttcttcacgaggcagacctcagcgc

[0343] In some embodiments, the nucleic acid sequence comprises an FNR-responsive promoter linked to a gene sequence encoding an EGF fusion polypeptide. In certain embodiments, the nucleic acid comprising the FNR-responsive promoter linked to a gene sequence encoding an EGF fusion polypeptide has at least about 80%, 85%, 90%, 95%, or 99% identity with Sequence Z. In some embodiments, the nucleic acid comprising the FNR-responsive promoter linked to a gene sequence encoding an EGF fusion polypeptide has at least about 85%, 86%, 87%, 88%, 89%, 90%, 91%, 92%, 93%, 94%, 95%, 96%, 97%, 98%, or 99% identity with Sequence Z. In some specific embodiments, the nucleic acid comprising the gene sequence encoding an EGF fusion polypeptide comprises Sequence I (PhoA-EGF) with an FNR-responsive element of any one of SEQ ID NO: 151-167. In other specific embodiments the nucleic acid comprising the human EGF gene sequence consists of Sequence I with an FNR-responsive element of any one of SEQ ID NO: 151-167.

Sequence Z (pFNR-PhoA-EGF):
tagcggagtgtatactggcttactatgttggcactgatgagggtgtcagtgaagtgcttcatgtggcaggagaaaaaaggctgcaccggtgcgt
cagcagaatatgtgatacaggatatattccgcttcctcgctcactgactcgctacgctcggtcgttcgactgcggcgagcggaaatggcttacg
aacggggcggagatttcctggaagatgccaggaagatacttaacagggaagtgagagggccgcggcaaagccgtttttccataggctccgc
ccccctgacaagcatcacgaaatctgacgctcaaatcagtggtggcgaaacccgacaggactataaagataccaggcgtttcccctggggc
tccctcgtgcgctctcctgttcctgcctttcggtttaccggtgtcattccgctgttatggccgcgtttgtctcattccacgcctgacactcagtt
ccgggtaggcagttcgctccaagctggactgtatgcacgaaccccccgttcagtccgaccgctgcgccttatccggtaactatcgtcttgagtcc
aacccggaaagacatgcaaaagcaccactggcagcagccactggtaattgatttagaggagttagtcttgaagtcatgcgccggttaaggctaaa
ctgaaaggacaagttttggtgactgcgctcctccaagccagttacctcggttcaaagagttggtagctcagagaaccttcgaaaaaccgccctgc
aaggcggttttttcgttttcagagcaagagattacgcgcagaccaaaacgatctcaagaagatcatcttattaaggggtctgacgctcagtggaa
cggtgcaccctgcagggctagctgataaagcgttcgcgctgcattcggcagtttaattaaAGTTGTTCTTATTGGTGGTGTT
GCTTTATGGTTGCATCGTAGTAAATGGTTGTAACAAAAGCAATTTTTCCGGCTGTCTGT
ATACAAAAACGCCGCAAAGTTTGAGCGAAGTCAATAAACTCTCTACCCATTCAGGGC
AATATCTCTCTTggatccaaagtgaactctagaaataattttgtttaactttaagaaggaggtatacatatgaaacaaagcactattgca
ctggcactcttaccgttactgtttacccctgtgacaaaagcgAATAGTGACAGCGAATGTCCGCTGTCGCACGAT
GGTTATTGCCTTCATGATGGGGTGTGCATGTACATTGAGGCATTGGACAAATATGCCT
GCAACTGTGTTGTCGGCTATATCGGCGAACGGTGTCAGTACCGTGATCTGAAATGGTG
GGAATTACGCtaaGCATGCTAATCAGCCGTGGAATTCGGTCTCaGGAGgTACGCATGGC
ATGGATGACCCGGTGaacgcatgagAAAGCCCCCGGAAGATCACCTTCCGGGGGCTTTtttattg
cgcGGACCAAAACGAAAAAAGACGCTCGAAAGCGTCTCTTTTCTGGAATTTGGTACCG
AGGcgtaatgctctgccagtgttacaaccaattaaccaattctgattagaaaaactcatcgagcatcaaatgaaactgcaatttattcatatcag
gattatcaataccatatttttgaaaaagccgtttctgtaatgaaggagaaaactcaccgaggcagttccataggatggcaagatcctggtatcgg
tctgcgattccgactcgtccaacatcaatacaacctattaatttcccctcgtcaaaaataaggttatcaagtgagaaatcaccatgagtgacgac
tgaatccggtgagaatggcaaaagcttatgcatttctttccagacttgttcaacaggccagccattacgctcgtcatcaaaatcactcgcatcaa
ccaaaccgttattcattcgtgattgcgcctgagcgagacgaaatacgcgatcgctgttaaaaggacaattacaaacaggaatcgaatgcaaccgg
cgcaggaacactgccagcgcatcaacaatattttcacctgaatcaggatattcttctaatacctggaatgctgttttcccggggatcgcagtggt
gagtaaccatgcatcatcaggagtacggataaaatgcttgatggtcggaagaggcataaattccgtcagccagtttagtctgaccatctcatctg
taacatcattggcaacgctacctttgccatgtttcagaaacaactctggcgcatcgggcttcccatacaatcgatagattgtcgcacctgattgc
ccgacattatcgcgagcccatttatacccatataaatcagcatccatgttggaatttaatcgcggcctcgagcaagacgtttcccgttgaatatg
gctcataacaccccttgtattactgtttatgtaagcagacagttttattgttcatgatgatatatttttatcttgtgcaatgtaacatcagagat
tttgagacacaacgtggctttgttgaataaatcgaacttttgctgagttgaaggatcagatcacgcatcttcccgacaacgcagaccgttccgtg
gcaaagcaaaagttcaaaatcaccaactggtccacctacaacaaagctctcatcaaccgtggctccctcactttctggctggatgatggggcgat
tcaggcctggtatgagtcagcaacaccttcttcacgaggcagacctcagcgc

[0344] In some embodiments, the nucleic acid sequence comprises an FNR-responsive promoter linked to a gene sequence encoding an EGF fusion polypeptide. In certain embodiments, the nucleic acid comprising the FNR-responsive promoter linked to a gene sequence encoding an EGF fusion polypeptide has at least about 80%, 85%, 90%, 95%, or 99% identity with Sequence AA. In some embodiments, the nucleic acid comprising the FNR-responsive promoter linked to a gene sequence encoding an EGF fusion polypeptide has at least about 85%, 86%, 87%, 88%, 89%, 90%, 91%, 92%, 93%, 94%, 95%, 96%, 97%, 98%, or 99% identity with Sequence AA. In some specific embodiments, the nucleic acid comprising the gene sequence encoding an EGF fusion polypeptide comprises Sequence J (OmpA-EGF) with an FNR-responsive element of any one of SEQ ID NO: 151-167. In other specific embodiments the nucleic acid comprising the human EGF gene sequence consists of Sequence J with an FNR-responsive element of any one of SEQ ID NO: 151-167.

Sequence AA (pFNR-OmpA-EGF):
tagcggagtgtatactggcttactatgttggcactgatgagggtgtcagtgaagtgcttcatgtggcaggagaaaaaaggctgcaccggtgcgt
cagcagaatatgtgatacaggatatattccgcttcctcgctcactgactcgctacgctcggtcgttcgactgcggcgagcggaaatggcttacg
aacggggcggagatttcctggaagatgccaggaagatacttaacagggaagtgagagggccgcggcaaagccgtttttccataggctccgc
ccccctgacaagcatcacgaaatctgacgctcaaatcagtggtggcgaaacccgacaggactataaagataccaggcgtttcccctggcggc
tccctcgtgcgctctcctgttcctgcctttcggtttaccggtgtcattccgctgttatggccgcgtttgtctcattccacgcctgacactcagtt
ccgggtaggcagttcgctccaagctggactgtatgcacgaaccccccgttcagtccgaccgctgcgccttatccggtaactatcgtcttgagtcc
aacccggaaagacatgcaaaagcaccactggcagcagccactggtaattgatttagaggagttagtcttgaagtcatgcgccggttaaggctaaa
ctgaaaggacaagttttggtgactgcgctcctccaagccagttacctcggttcaaagagttggtagctcagagaaccttcgaaaaaccgccctgc
aaggcggttttttcgttttcagagcaagagattacgcgcagaccaaaacgatctcaagaagatcatcttattaaggggtctgacgctcagtggaa
cggtgcaccctgcagggctagctgataaagcgttcgcgctgcattcggcagtttaattaaAGTTGTTCTTATTGGTGGTGTT
GCTTTATGGTTGCATCGTAGTAAATGGTTGTAACAAAAGCAATTTTTCCGGCTGTCTGT
ATACAAAAACGCCGCAAAGTTTGAGCGAAGTCAATAAACTCTCTACCCATTCAGGGC
AATATCTCTCTTggatccaaagtgaactctagaaataattttgtttaactttaagaaggaggtatacatATGAAGAAAACC
GCAATTGCAATCGCCGTCGCTCTGGCGGGGTTCGCTACGGTCGCCCAAGCCAATAGTG
ACAGCGAATGTCCGCTGTCGCACGATGGTTATTGCCTTCATGATGGGGTGTGCATGTA
CATTGAGGCATTGGACAAATATGCCTGCAACTGTGTTGTCGGCTATATCGGCGAACGG
TGTCAGTACCGTGATCTGAAATGGTGGGAATTACGCtaaGCATGCTAATCAGCCGTGGA
ATTCGGTCTCaGGAGgAACGATTGGTAAACCCGGTGaacgcatgagAAAGCCCCCGGAAGA
TCACCTTCCGGGGGCTTTtttattgcgcGGACCAAAACGAAAAAAGACGCTCGAAAGCGTCT
CTTTTCTGGAATTTGGTACCGAGGcgtaatgctctgccagtgttacaaccaattaaccaattctgattagaaaaactcatcg
agcatcaaatgaaactgcaatttattcatatcaggattatcaataccatatttttgaaaaagccgtttctgtaatgaaggagaaaactcaccgag
gcagttccataggatggcaagatcctggtatcggtctgcgattccgactcgtccaacatcaatacaacctattaatttcccctcgtcaaaaataa
ggttatcaagtgagaaatcaccatgagtgacgactgaatccggtgagaatggcaaaagcttatgcatttctttccagacttgttcaacaggccag
ccattacgctcgtcatcaaaatcactcgcatcaaccaaaccgttattcattcgtgattgcgcctgagcgagacgaaatacgcgatcgctgttaaa
aggacaattacaaacaggaatcgaatgcaaccggcgcaggaacactgccagcgcatcaacaatattttcacctgaatcaggatattcttctaata
cctggaatgctgttttcccggggatcgcagtggtgagtaaccatgcatcatcaggagtacggataaaatgcttgatggtcggaagaggcataaat
tccgtcagccagtttagtctgaccatctcatctgtaacatcattggcaacgctacctttgccatgtttcagaaacaactctggcgcatcgggctt
cccatacaatcgatagattgtcgcacctgattgcccgacattatcgcgagcccatttatacccatataaatcagcatccatgttggaatttaatc
gcggcctcgagcaagacgtttcccgttgaatatggctcataacaccccttgtattactgtttatgtaagcagacagttttattgttcatgatgat
atatttttatcttgtgcaatgtaacatcagagattttgagacacaacgtggctttgttgaataaatcgaacttttgctgagttgaaggatcagat
cacgcatcttcccgacaacgcagaccgttccgtggcaaagcaaaagttcaaaatcaccaactggtccacctacaacaaagctctcatcaaccgtg
gctccctcactttctggctggatgatggggcgattcaggcctggtatgagtcagcaacaccttcttcacgaggcagacctcagcgc

[0345] In some embodiments, the nucleic acid sequence comprises a temperature sensitive promoter linked to a gene sequence encoding an EGF fusion polypeptide. In certain embodiments, the nucleic acid comprising the temperature sensitive promoter linked to a gene sequence encoding an EGF fusion polypeptide has at least about 80%, 85%, 90%, 95%, or 99% identity with Sequence AB. In some embodiments, the nucleic acid comprising the temperature sensitive promoter linked to a gene sequence encoding an EGF fusion polypeptide has at least about 85%, 86%, 87%, 88%, 89%, 90%, 91%, 92%, 93%, 94%, 95%, 96%, 97%, 98%, or 99% identity with Sequence AB. In some specific embodiments, the nucleic acid comprising the gene sequence encoding an EGF fusion polypeptide comprises Sequence H (PelB-EGF) with a temperature sensitive element of any one of SEQ ID NO: 183-185. In other specific embodiments the nucleic acid comprising the human EGF gene sequence consists of Sequence H with a temperature sensitive promoter construct that further comprises a gene encoding mutant cI857 repressor that comprises any one of SEQ ID NO: 183-185.

Sequence AB (CI857-pR-PelB-EGF):
aatacaacctattaatttcccctcgtcaaaaataaggttatcaagtgagaaatcaccatgagtgacgactgaatccggtgagaatggcaaaagct
tatgcatttctttccagacttgttcaacaggccagccattacgctcgtcatcaaaatcactcgcatcaaccaaaccgttattcattcgtgattgc
gcctgagcgagacgaaatacgcgatcgctgttaaaaggacaattacaaacaggaatcgaatgcaaccggcgcaggaacactgccagcgcatcaa
caatattttcacctgaatcaggatattcttctaatacctggaatgctgttttcccggggatcgcagtggtgagtaaccatgcatcatcaggagta
cggataaaatgcttgatggtcggaagaggcataaattccgtcagccagtttagtctgaccatctcatctgtaacatcattggcaacgctaccttt
gccatgtttcagaaacaactctggcgcatcgggcttcccatacaatcgatagattgtcgcacctgattgcccgacattatcgcgagcccatttat
acccatataaatcagcatccatgttggaatttaatcgcggcctcgagcaagacgtttcccgttgaatatggctcataacaccccttgtattactg
tttatgtaagcagacagttttattgttcatgatgatatatttttatcttgtgcaatgtaacatcagagattttgagacacaacgtggctttgttg
aataaatcgaacttttgctgagttgaaggatcagatcacgcatcttcccgacaacgcagaccgttccgtggcaaagcaaaagttcaaaatcacca
actggtccacctacaacaaagctctcatcaaccgtggctccctcactttctggctggatgatggggcgattcaggcctggtatgagtcagcaaca
ccttcttcacgaggcagacctcagcgctagcggagtgtatactggcttactatgttggcactgatgagggtgtcagtgaagtgcttcatgtggca
ggagaaaaaaggctgcaccggtgcgtcagcagaatatgtgatacaggatatattccgcttcctcgctcactgactcgctacgctcggtcgttcga
ctgcggcgagcggaaatggcttacgaacggggcggagatttcctggaagatgccaggaagatacttaacagggaagtgagagggccgcggcaaag
ccgtttttccataggctccgcccccctgacaagcatcacgaaatctgacgctcaaatcagtggtggcgaaacccgacaggactataaagatacca
ggcgtttcccctggcggctccctcgtgcgctctcctgttcctgcctttcggtttaccggtgtcattccgctgttatggccgcgtttgtctcattc
cacgcctgacactcagttccgggtaggcagttcgctccaagctggactgtatgcacgaaccccccgttcagtccgaccgctgcgccttatccggt
aactatcgtcttgagtccaacccggaaagacatgcaaaagcaccactggcagcagccactggtaattgatttagaggagttagtcttgaagtcat
gcgccggttaaggctaaactgaaaggacaagttttggtgactgcgctcctccaagccagttacctcggttcaaagagttggtagctcagagaacc
ttcgaaaaaccgccctgcaaggcggttttttcgttttcagagcaagagattacgcgcagaccaaaacgatctcaagaagatcatcttattaaggg
gtctgacgctcagtggaacggtgcaccctgcagggctagctgataaagcgttcgcgctgcattcggcagtttaattaaTCAGCCAAACGT
CTCTTCAGGCCACTGACTAGCGATAACTTTCCCCACAACGGAACAACTCTCATTGCAT
GGGATCATTGGGTACTGTGGGTTTAGTGGTTGTAAAAACACCTGACCGCTATCCCTGA
TCAGTTTCTTGAAGGTAAACTCATCACCCCCAAGTCTGGCTATGCAGAAATCACCTGG
CTCAACAGCCTGCTCAGGGTCAACGAGAATTAACATTCCGTCAGGAAAGCTTGGCTTG
GAGCCTGTTGGTGCGGTCATGGAATTACCTTCAACCTCAAGCCAGAATGCAGAATCAC
TGGCTTTTTTGGTTGTGCTTACCCATCTCTCCGCATCACCTTTGGTAAAGGTTCTAAGC
TTAGGTGAGAACATCCCTGCCTGAACATGAGAAAAAACAGGGTACTCATACTCACTTC
TAAGTGACGGCTGCATACTAACCGCTTCATACATCTCGTAGATTTCTCTGGCGATTGA
AGGGCTAAATTCTTCAACGCTAACTTTGAGAATTTTTGTAAGCAATGCGGCGTTATAA
GCATTTAATGCATTGATGCCATTAAATAAAGCACCAACGCCTGACTGCCCCATCCCCA
TCTTGTCTGCGACAGATTCCTGGGATAAGCCAAGTTCATTTTTCTTTTTTTCATAAATT
GCTTTAAGGCGACGTGCGTCCTCAAGCTGCTCTTGTGTTAATGGTTTCTTTTTTGTGCT
CATACGTTAAATCTATCACCGCAAGGGATAAATATCTAACACCGTGCGTGTTGACTAT
TTTACCTCTGGCGGTGATAATGGTTGCATaataattttgtttaactttaagaaggaggtatacatatgaaatatctgttgc
ccacggctgccgcgggtctgctgctgctggcagcgcaaccggctATGGCAAATAGTGACAGCGAATGTCCGCT
GTCGCACGATGGTTATTGCCTTCATGATGGGGTGTGCATGTACATTGAGGCATTGGAC
AAATATGCCTGCAACTGTGTTGTCGGCTATATCGGCGAACGGTGTCAGTACCGTGATC
TGAAATGGTGGGAATTACGCtaaGCATGCTAATCAGCCGTGGAATTCGGTCTCaGGAGg
AACGATTGGTAAACCCGGTGaacgcatgagAAAGCCCCCGGAAGATCACCTTCCGGGGGCT
TTtttattgcgcGGACCAAAACGAAAAAAGACGCTCGAAAGCGTCTCTTTTCTGGAATTTGG
TACCGAGGcgtaatgctctgccagtgttacaaccaattaaccaattctgattagaaaaactcatcgagcatcaaatgaaactgcaatttatt
catatcaggattatcaataccatatttttgaaaaagccgtttctgtaatgaaggagaaaactcaccgaggcagttccataggatggcaagatcct
ggtatcggtctgcgattccgactcgtccaacatc

[0346] In some embodiments, the nucleic acid sequence comprises a temperature sensitive promoter linked to a gene sequence encoding an EGF fusion polypeptide. In certain embodiments, the nucleic acid comprising the temperature sensitive promoter linked to a gene sequence encoding an EGF fusion polypeptide has at least about 80%, 85%, 90%, 95%, or 99% identity with Sequence AC. In some embodiments, the nucleic acid comprising the temperature sensitive promoter linked to a gene sequence encoding an EGF fusion polypeptide has at least about 85%, 86%, 87%, 88%, 89%, 90%, 91%, 92%, 93%, 94%, 95%, 96%, 97%, 98%, or 99% identity with Sequence AC. In some specific embodiments, the nucleic acid comprising the gene sequence encoding an EGF fusion polypeptide comprises Sequence I (PhoA-EGF) with a temperature sensitive element of any one of SEQ ID NO: 183-185. In other specific embodiments the nucleic acid comprising the human EGF gene sequence consists of Sequence I with a temperature sensitive promoter construct that further comprises a gene encoding mutant cI857 repressor that comprises any one of SEQ ID NO: 183-185.

Sequence AC (CI857-pR-PhoA-EGF):
tagcggagtgtatactggcttactatgttggcactgatgagggtgtcagtgaagtgcttcatgtggcaggagaaaaaaggctgcaccggtgcgt
cagcagaatatgtgatacaggatatattccgcttcctcgctcactgactcgctacgctcggtcgttcgactgcggcgagcggaaatggcttacg
aacggggcggagatttcctggaagatgccaggaagatacttaacagggaagtgagagggccgcggcaaagccgtttttccataggctccgc
ccccctgacaagcatcacgaaatctgacgctcaaatcagtggtggcgaaacccgacaggactataaagataccaggcgtttcccctggcggc
tccctcgtgcgctctcctgttcctgcctttcggtttaccggtgtcattccgctgttatggccgcgtttgtctcattccacgcctgacactcagtt
ccgggtaggcagttcgctccaagctggactgtatgcacgaaccccccgttcagtccgaccgctgcgccttatccggtaactatcgtcttgagtcc
aacccggaaagacatgcaaaagcaccactggcagcagccactggtaattgatttagaggagttagtcttgaagtcatgcgccggttaaggctaaa
ctgaaaggacaagttttggtgactgcgctcctccaagccagttacctcggttcaaagagttggtagctcagagaaccttcgaaaaaccgccctgc
aaggcggttttttcgttttcagagcaagagattacgcgcagaccaaaacgatctcaagaagatcatcttattaaggggtctgacgctcagtggaa
cggtgcaccctgcagggctagctgataaagcgttcgcgctgcattcggcagtttaattaaTCAGCCAAACGTCTCTTCAGG
CCACTGACTAGCGATAACTTTCCCCACAACGGAACAACTCTCATTGCATGGGATCATT
GGGTACTGTGGGTTTAGTGGTTGTAAAAACACCTGACCGCTATCCCTGATCAGTTTCTT
GAAGGTAAACTCATCACCCCCAAGTCTGGCTATGCAGAAATCACCTGGCTCAACAGC
CTGCTCAGGGTCAACGAGAATTAACATTCCGTCAGGAAAGCTTGGCTTGGAGCCTGTT
GGTGCGGTCATGGAATTACCTTCAACCTCAAGCCAGAATGCAGAATCACTGGCTTTTT
TGGTTGTGCTTACCCATCTCTCCGCATCACCTTTGGTAAAGGTTCTAAGCTTAGGTGAG
AACATCCCTGCCTGAACATGAGAAAAAACAGGGTACTCATACTCACTTCTAAGTGACG
GCTGCATACTAACCGCTTCATACATCTCGTAGATTTCTCTGGCGATTGAAGGGCTAAA
TTCTTCAACGCTAACTTTGAGAATTTTTGTAAGCAATGCGGCGTTATAAGCATTTAATG
CATTGATGCCATTAAATAAAGCACCAACGCCTGACTGCCCCATCCCCATCTTGTCTGC
GACAGATTCCTGGGATAAGCCAAGTTCATTTTTCTTTTTTTCATAAATTGCTTTAAGGC
GACGTGCGTCCTCAAGCTGCTCTTGTGTTAATGGTTTCTTTTTTGTGCTCATACGTTAA
ATCTATCACCGCAAGGGATAAATATCTAACACCGTGCGTGTTGACTATTTTACCTCTG
GCGGTGATAATGGTTGCATaataattttgtttaactttaagaaggaggtatacatatgaaacaaagcactattgcactggcactc
ttaccgttactgtttacccctgtgacaaaagcgAATAGTGACAGCGAATGTCCGCTGTCGCACGATGGTTA
TTGCCTTCATGATGGGGTGTGCATGTACATTGAGGCATTGGACAAATATGCCTGCAAC
TGTGTTGTCGGCTATATCGGCGAACGGTGTCAGTACCGTGATCTGAAATGGTGGGAAT
TACGCtaaGCATGCTAATCAGCCGTGGAATTCGGTCTCaGGAGgAACGATTGGTAAACCC
GGTGaacgcatgagAAAGCCCCCGGAAGATCACCTTCCGGGGGCTTTtttattgcgcGGACCAAA
ACGAAAAAAGACGCTCGAAAGCGTCTCTTTTCTGGAATTTGGTACCGAGGcgtaatgctctgc
cagtgttacaaccaattaaccaattctgattagaaaaactcatcgagcatcaaatgaaactgcaatttattcatatcaggattatcaataccata
tttttgaaaaagccgtttctgtaatgaaggagaaaactcaccgaggcagttccataggatggcaagatcctggtatcggtctgcgattccgactc
gtccaacatcaatacaacctattaatttcccctcgtcaaaaataaggttatcaagtgagaaatcaccatgagtgacgactgaatccggtgagaat
ggcaaaagcttatgcatttctttccagacttgttcaacaggccagccattacgctcgtcatcaaaatcactcgcatcaaccaaaccgttattcat
tcgtgattgcgcctgagcgagacgaaatacgcgatcgctgttaaaaggacaattacaaacaggaatcgaatgcaaccggcgcaggaacactgcca
gcgcatcaacaatattttcacctgaatcaggatattcttctaatacctggaatgctgttttcccggggatcgcagtggtgagtaaccatgcatca
tcaggagtacggataaaatgcttgatggtcggaagaggcataaattccgtcagccagtttagtctgaccatctcatctgtaacatcattggcaac
gctacctttgccatgtttcagaaacaactctggcgcatcgggcttcccatacaatcgatagattgtcgcacctgattgcccgacattatcgcgag
cccatttatacccatataaatcagcatccatgttggaatttaatcgcggcctcgagcaagacgtttcccgttgaatatggctcataacacccctt
gtattactgtttatgtaagcagacagttttattgttcatgatgatatatttttatcttgtgcaatgtaacatcagagattttgagacacaacgtg
gctttgttgaataaatcgaacttttgctgagttgaaggatcagatcacgcatcttcccgacaacgcagaccgttccgtggcaaagcaaaagttca
aaatcaccaactggtccacctacaacaaagctctcatcaaccgtggctccctcactttctggctggatgatggggcgattcaggcctggtatgag
tcagcaacaccttcttcacgaggcagacctcagcgc

[0347] In some embodiments, the nucleic acid sequence comprises a temperature sensitive promoter linked to a gene sequence encoding an EGF fusion polypeptide. In certain embodiments, the nucleic acid comprising the temperature sensitive promoter linked to a gene sequence encoding an EGF fusion polypeptide has at least about 80%, 85%, 90%, 95%, or 99% identity with Sequence AD. In some embodiments, the nucleic acid comprising the temperature sensitive promoter linked to a gene sequence encoding an EGF fusion polypeptide has at least about 85%, 86%, 87%, 88%, 89%, 90%, 91%, 92%, 93%, 94%, 95%, 96%, 97%, 98%, or 99% identity with Sequence AD. In some specific embodiments, the nucleic acid comprising the gene sequence encoding an EGF fusion polypeptide comprises Sequence J (OmpA-EGF) with a temperature sensitive element of any one of SEQ ID NO: 183-185. In other specific embodiments the nucleic acid comprising the human EGF gene sequence consists of Sequence J with a temperature sensitive promoter construct that further comprises a gene encoding mutant cI857 repressor that comprises any one of SEQ ID NO: 183-185.

Sequence AD (CI857-pR-OmpA-EGF):
tagcggagtgtatactggcttactatgttggcactgatgagggtgtcagtgaagtgcttcatgtggcaggagaaaaaaggctgcaccggtgcgt
cagcagaatatgtgatacaggatatattccgcttcctcgctcactgactcgctacgctcggtcgttcgactgcggcgagcggaaatggcttacg
aacggggcggagatttcctggaagatgccaggaagatacttaacagggaagtgagagggccgcggcaaagccgtttttccataggctccgc
ccccctgacaagcatcacgaaatctgacgctcaaatcagtggtggcgaaacccgacaggactataaagataccaggcgtttcccctggcggc
tccctcgtgcgctctcctgttcctgcctttcggtttaccggtgtcattccgctgttatggccgcgtttgtctcattccacgcctgacactcagtt
ccgggtaggcagttcgctccaagctggactgtatgcacgaaccccccgttcagtccgaccgctgcgccttatccggtaactatcgtcttgagtcc
aacccggaaagacatgcaaaagcaccactggcagcagccactggtaattgatttagaggagttagtcttgaagtcatgcgccggttaaggctaaa
ctgaaaggacaagttttggtgactgcgctcctccaagccagttacctcggttcaaagagttggtagctcagagaaccttcgaaaaaccgccctgc
aaggcggttttttcgttttcagagcaagagattacgcgcagaccaaaacgatctcaagaagatcatcttattaaggggtctgacgctcagtggaa
cggtgcaccctgcagggctagctgataaagcgttcgcgctgcattcggcagtttaattaaTCAGCCAAACGTCTCTTCAGG
CCACTGACTAGCGATAACTTTCCCCACAACGGAACAACTCTCATTGCATGGGATCATT
GGGTACTGTGGGTTTAGTGGTTGTAAAAACACCTGACCGCTATCCCTGATCAGTTTCTT
GAAGGTAAACTCATCACCCCCAAGTCTGGCTATGCAGAAATCACCTGGCTCAACAGC
CTGCTCAGGGTCAACGAGAATTAACATTCCGTCAGGAAAGCTTGGCTTGGAGCCTGTT
GGTGCGGTCATGGAATTACCTTCAACCTCAAGCCAGAATGCAGAATCACTGGCTTTTT
TGGTTGTGCTTACCCATCTCTCCGCATCACCTTTGGTAAAGGTTCTAAGCTTAGGTGAG
AACATCCCTGCCTGAACATGAGAAAAAACAGGGTACTCATACTCACTTCTAAGTGACG
GCTGCATACTAACCGCTTCATACATCTCGTAGATTTCTCTGGCGATTGAAGGGCTAAA
TTCTTCAACGCTAACTTTGAGAATTTTTGTAAGCAATGCGGCGTTATAAGCATTTAATG
CATTGATGCCATTAAATAAAGCACCAACGCCTGACTGCCCCATCCCCATCTTGTCTGC
GACAGATTCCTGGGATAAGCCAAGTTCATTTTTCTTTTTTTCATAAATTGCTTTAAGGC
GACGTGCGTCCTCAAGCTGCTCTTGTGTTAATGGTTTCTTTTTTGTGCTCATACGTTAA
ATCTATCACCGCAAGGGATAAATATCTAACACCGTGCGTGTTGACTATTTTACCTCTG
GCGGTGATAATGGTTGCATaataattttgtttaactttaagaaggaggtatacatATGAAGAAAACCGCAATT
GCAATCGCCGTCGCTCTGGCGGGGTTCGCTACGGTCGCCCAAGCCAATAGTGACAGC
GAATGTCCGCTGTCGCACGATGGTTATTGCCTTCATGATGGGGTGTGCATGTACATTG
AGGCATTGGACAAATATGCCTGCAACTGTGTTGTCGGCTATATCGGCGAACGGTGTCA
GTACCGTGATCTGAAATGGTGGGAATTACGCtaaGCATGCTAATCAGCCGTGGAATTCG
GTCTCaGGAGgAACGATTGGTAAACCCGGTGaacgcatgagAAAGCCCCCGGAAGATCACC
TTCCGGGGGCTTTtttattgcgcGGACCAAAACGAAAAAAGACGCTCGAAAGCGTCTCTTTT
CTGGAATTTGGTACCGAGGcgtaatgctctgccagtgttacaaccaattaaccaattctgattagaaaaactcatcgagcatca
aatgaaactgcaatttattcatatcaggattatcaataccatatttttgaaaaagccgtttctgtaatgaaggagaaaactcaccgaggcagttc
cataggatggcaagatcctggtatcggtctgcgattccgactcgtccaacatcaatacaacctattaatttcccctcgtcaaaaataaggttatc
aagtgagaaatcaccatgagtgacgactgaatccggtgagaatggcaaaagcttatgcatttctttccagacttgttcaacaggccagccattac
gctcgtcatcaaaatcactcgcatcaaccaaaccgttattcattcgtgattgcgcctgagcgagacgaaatacgcgatcgctgttaaaaggacaa
ttacaaacaggaatcgaatgcaaccggcgcaggaacactgccagcgcatcaacaatattttcacctgaatcaggatattcttctaatacctggaa
tgctgttttcccggggatcgcagtggtgagtaaccatgcatcatcaggagtacggataaaatgcttgatggtcggaagaggcataaattccgtca
gccagtttagtctgaccatctcatctgtaacatcattggcaacgctacctttgccatgtttcagaaacaactctggcgcatcgggcttcccatac
aatcgatagattgtcgcacctgattgcccgacattatcgcgagcccatttatacccatataaatcagcatccatgttggaatttaatcgcggcct
cgagcaagacgtttcccgttgaatatggctcataacaccccttgtattactgtttatgtaagcagacagttttattgttcatgatgatatatttt
tatcttgtgcaatgtaacatcagagattttgagacacaacgtggctttgttgaataaatcgaacttttgctgagttgaaggatcagatcacgcat
cttcccgacaacgcagaccgttccgtggcaaagcaaaagttcaaaatcaccaactggtccacctacaacaaagctctcatcaaccgtggctccct
cactttctggctggatgatggggcgattcaggcctggtatgagtcagcaacaccttcttcacgaggcagacctcagcgc

[0348] In some embodiments, the nucleic acid sequence comprises a temperature sensitive promoter linked to a gene sequence encoding an EGF fusion polypeptide. In certain embodiments, the nucleic acid comprising the temperature sensitive promoter linked to a gene sequence encoding an EGF fusion polypeptide has at least about 80%, 85%, 90%, 95%, or 99% identity with Sequence AE. In some embodiments, the nucleic acid comprising the temperature sensitive promoter linked to a gene sequence encoding an EGF fusion polypeptide has at least about 85%, 86%, 87%, 88%, 89%, 90%, 91%, 92%, 93%, 94%, 95%, 96%, 97%, 98%, or 99% identity with Sequence AE. In some specific embodiments, the nucleic acid comprising the gene sequence encoding an EGF fusion polypeptide comprises Sequence K (EGF-LARD3) with a temperature sensitive element of any one of SEQ ID NO: 183-185. In other specific embodiments the nucleic acid comprising the human EGF gene sequence consists of Sequence K with a temperature sensitive promoter construct that further comprises a gene encoding mutant cI857 repressor that comprises any one of SEQ ID NO: 183-185.

Sequence AE (CI857-pR-EGF-LARD3)
tagcggagtgtatactggcttactatgttggcactgatgagggtgtcagtgaagtgcttcatgtggcaggagaaaaaaggctgcaccggtgcgt
cagcagaatatgtgatacaggatatattccgcttcctcgctcactgactcgctacgctcggtcgttcgactgcggcgagcggaaatggcttacg
aacggggggagatttcctggaagatgccaggaagatacttaacagggaagtgagagggccgcggcaaagccgtttttccataggctccgc
ccccctgacaagcatcacgaaatctgacgctcaaatcagtggtggcgaaacccgacaggactataaagataccaggcgtttcccctggcggc
tccctcgtgcgctctcctgttcctgcctttcggtttaccggtgtcattccgctgttatggccgcgtttgtctcattccacgcctgacactcagtt
ccgggtaggcagttcgctccaagctggactgtatgcacgaaccccccgttcagtccgaccgctgcgccttatccggtaactatcgtcttgagtcc
aacccggaaagacatgcaaaagcaccactggcagcagccactggtaattgatttagaggagttagtcttgaagtcatgcgccggttaaggctaaa
ctgaaaggacaagttttggtgactgcgctcctccaagccagttacctcggttcaaagagttggtagctcagagaaccttcgaaaaaccgccctgc
aaggcggttttttcgttttcagagcaagagattacgcgcagaccaaaacgatctcaagaagatcatcttattaaggggtctgacgctcagtggaa
cggtgcaccctgcagggctagctgataaagcgttcgcgctgcattcggcagtttaattaaTCAGCCAAACGTCTCTTCAGG
CCACTGACTAGCGATAACTTTCCCCACAACGGAACAACTCTCATTGCATGGGATCATT
GGGTACTGTGGGTTTAGTGGTTGTAAAAACACCTGACCGCTATCCCTGATCAGTTTCTT
GAAGGTAAACTCATCACCCCCAAGTCTGGCTATGCAGAAATCACCTGGCTCAACAGC
CTGCTCAGGGTCAACGAGAATTAACATTCCGTCAGGAAAGCTTGGCTTGGAGCCTGTT
GGTGCGGTCATGGAATTACCTTCAACCTCAAGCCAGAATGCAGAATCACTGGCTTTTT
TGGTTGTGCTTACCCATCTCTCCGCATCACCTTTGGTAAAGGTTCTAAGCTTAGGTGAG
AACATCCCTGCCTGAACATGAGAAAAAACAGGGTACTCATACTCACTTCTAAGTGACG
GCTGCATACTAACCGCTTCATACATCTCGTAGATTTCTCTGGCGATTGAAGGGCTAAA
TTCTTCAACGCTAACTTTGAGAATTTTTGTAAGCAATGCGGCGTTATAAGCATTTAATG
CATTGATGCCATTAAATAAAGCACCAACGCCTGACTGCCCCATCCCCATCTTGTCTGC
GACAGATTCCTGGGATAAGCCAAGTTCATTTTTCTTTTTTTCATAAATTGCTTTAAGGC
GACGTGCGTCCTCAAGCTGCTCTTGTGTTAATGGTTTCTTTTTTGTGCTCATACGTTAA
ATCTATCACCGCAAGGGATAAATATCTAACACCGTGCGTGTTGACTATTTTACCTCTG
GCGGTGATAATGGTTGCATaataattttgtttaactttaagaaggaggtatacatATGAATAGTGACAGCGAA
TGTCCGCTGTCGCACGATGGTTATTGCCTTCATGATGGGGTGTGCATGTACATTGAGG
CATTGGACAAATATGCCTGCAACTGTGTTGTCGGCTATATCGGCGAACGGTGTCAGTA
CCGTGATCTGAAATGGTGGGAATTACGCATTGAGGGCCGGggttctgacggtaatgatcttatccaagg
cggtaagggcgcggacttcattgaaggcggcaaaggtaatgatacaatccgcgataactccggtcacaacacctttttgttctcagggcattttg
gtcaggatcgtattataggatatcagccgaccgatcggctggtattccagggcgctgacggcagcacggatctgcgcgaccatgcgaaagcc
gttggagcagatacggtgctgagttttggcgccgattcggttactctcgtcggggggggttaggaggcctgtggagcgagggtgtgctgatta
gttaaGCATGCTAATCAGCCGTGGAATTCGGTCTCaGGAGgAACGATTGGTAAACCCGGT
GaacgcatgagAAAGCCCCCGGAAGATCACCTTCCGGGGGCTTTtttattgcgcGGACCAAAACG
AAAAAAGACGCTCGAAAGCGTCTCTTTTCTGGAATTTGGTACCGAGGcgtaatgctctgccagtg
ttacaaccaattaaccaattctgattagaaaaactcatcgagcatcaaatgaaactgcaatttattcatatcaggattatcaataccatattttt
gaaaaagccgtttctgtaatgaaggagaaaactcaccgaggcagttccataggatggcaagatcctggtatcggtctgcgattccgactcgtcca
acatcaatacaacctattaatttcccctcgtcaaaaataaggttatcaagtgagaaatcaccatgagtgacgactgaatccggtgagaatggcaa
aagcttatgcatttctttccagacttgttcaacaggccagccattacgctcgtcatcaaaatcactcgcatcaaccaaaccgttattcattcgtg
attgcgcctgagcgagacgaaatacgcgatcgctgttaaaaggacaattacaaacaggaatcgaatgcaaccggcgcaggaacactgccagcgca
tcaacaatattttcacctgaatcaggatattcttctaatacctggaatgctgttttcccggggatcgcagtggtgagtaaccatgcatcatcagg
agtacggataaaatgcttgatggtcggaagaggcataaattccgtcagccagtttagtctgaccatctcatctgtaacatcattggcaacgctac
ctttgccatgtttcagaaacaactctggcgcatcgggcttcccatacaatcgatagattgtcgcacctgattgcccgacattatcgcgagcccat
ttatacccatataaatcagcatccatgttggaatttaatcgcggcctcgagcaagacgtttcccgttgaatatggctcataacaccccttgtatt
actgtttatgtaagcagacagttttattgttcatgatgatatatttttatcttgtgcaatgtaacatcagagattttgagacacaacgtggcttt
gttgaataaatcgaacttttgctgagttgaaggatcagatcacgcatcttcccgacaacgcagaccgttccgtggcaaagcaaaagttcaaaatc
accaactggtccacctacaacaaagctctcatcaaccgtggctccctcactttctggctggatgatggggcgattcaggcctggtatgagtcagc
aacaccttcttcacgaggcagacctcagcgc

[0349] In some embodiments, the nucleic acid sequence comprises a temperature sensitive promoter linked to a gene sequence encoding an EGF fusion polypeptide. In certain embodiments, the nucleic acid comprising the temperature sensitive promoter linked to a gene sequence encoding an EGF fusion polypeptide has at least about 80%, 85%, 90%, 95%, or 99% identity with Sequence AF. In some embodiments, the nucleic acid comprising the temperature sensitive promoter linked to a gene sequence encoding an EGF fusion polypeptide has at least about 85%, 86%, 87%, 88%, 89%, 90%, 91%, 92%, 93%, 94%, 95%, 96%, 97%, 98%, or 99% identity with Sequence AF. In some specific embodiments, the nucleic acid comprising the gene sequence encoding an EGF fusion polypeptide comprises Sequence L (EGF-HylA) with a temperature sensitive element of any one of SEQ ID NO: 183-185. In other specific embodiments the nucleic acid comprising the human EGF gene sequence consists of Sequence L with a temperature sensitive promoter construct that further comprises a gene encoding mutant cI857 repressor that comprises any one of SEQ ID NO: 183-185.

Sequence AF (CI857-pR-EGF-HylA)
tagcggagtgtatactggcttactatgttggcactgatgagggtgtcagtgaagtgcttcatgtggcaggagaaaaaaggctgcaccggtgcgt
cagcagaatatgtgatacaggatatattccgcttcctcgctcactgactcgctacgctcggtcgttcgactgcggcgagcggaaatggcttacg
aacggggcggagatttcctggaagatgccaggaagatacttaacagggaagtgagagggccgcggcaaagccgtttttccataggctccgc
ccccctgacaagcatcacgaaatctgacgctcaaatcagtggtggcgaaacccgacaggactataaagataccaggcgtttcccctggcggc
tccctcgtgcgctctcctgttcctgcctttcggtttaccggtgtcattccgctgttatggccgcgtttgtctcattccacgcctgacactcagtt
ccgggtaggcagttcgctccaagctggactgtatgcacgaaccccccgttcagtccgaccgctgcgccttatccggtaactatcgtcttgagtcc
aacccggaaagacatgcaaaagcaccactggcagcagccactggtaattgatttagaggagttagtcttgaagtcatgcgccggttaaggctaaa
ctgaaaggacaagttttggtgactgcgctcctccaagccagttacctcggttcaaagagttggtagctcagagaaccttcgaaaaaccgccctgc
aaggcggttttttcgttttcagagcaagagattacgcgcagaccaaaacgatctcaagaagatcatcttattaaggggtctgacgctcagtggaa
cggtgcaccctgcagggctagctgataaagcgttcgcgctgcattcggcagtttaattaaTCAGCCAAACGTCTCTTCAGG
CCACTGACTAGCGATAACTTTCCCCACAACGGAACAACTCTCATTGCATGGGATCATT
GGGTACTGTGGGTTTAGTGGTTGTAAAAACACCTGACCGCTATCCCTGATCAGTTTCTT
GAAGGTAAACTCATCACCCCCAAGTCTGGCTATGCAGAAATCACCTGGCTCAACAGC
CTGCTCAGGGTCAACGAGAATTAACATTCCGTCAGGAAAGCTTGGCTTGGAGCCTGTT
GGTGCGGTCATGGAATTACCTTCAACCTCAAGCCAGAATGCAGAATCACTGGCTTTTT
TGGTTGTGCTTACCCATCTCTCCGCATCACCTTTGGTAAAGGTTCTAAGCTTAGGTGAG
AACATCCCTGCCTGAACATGAGAAAAAACAGGGTACTCATACTCACTTCTAAGTGACG
GCTGCATACTAACCGCTTCATACATCTCGTAGATTTCTCTGGCGATTGAAGGGCTAAA
TTCTTCAACGCTAACTTTGAGAATTTTTGTAAGCAATGCGGCGTTATAAGCATTTAATG
CATTGATGCCATTAAATAAAGCACCAACGCCTGACTGCCCCATCCCCATCTTGTCTGC
GACAGATTCCTGGGATAAGCCAAGTTCATTTTTCTTTTTTTCATAAATTGCTTTAAGGC
GACGTGCGTCCTCAAGCTGCTCTTGTGTTAATGGTTTCTTTTTTGTGCTCATACGTTAA
ATCTATCACCGCAAGGGATAAATATCTAACACCGTGCGTGTTGACTATTTTACCTCTG
GCGGTGATAATGGTTGCATaataattttgtttaactttaagaaggaggtatacatATGAATAGTGACAGCGAA
TGTCCGCTGTCGCACGATGGTTATTGCCTTCATGATGGGGTGTGCATGTACATTGAGG
CATTGGACAAATATGCCTGCAACTGTGTTGTCGGCTATATCGGCGAACGGTGTCAGTA
CCGTGATCTGAAATGGTGGGAATTACGCtcaacttatgggagccaggacaatcttaatccattaattaatgaaatcag
caaaatcatttcagctgcaggtaacttcgatgttaaggaggaaagatctgccgcttctttattgcagttgtccggtaatgccagtgatttttcat
atggacggaactcaataactttgacagcatcagcataaGCATGCTAATCAGCCGTGGAATTCGGTCTCaGGAGgA
ACGATTGGTAAACCCGGTGaacgcatgagAAAGCCCCCGGAAGATCACCTTCCGGGGGCTT
TtttattgcgcGGACCAAAACGAAAAAAGACGCTCGAAAGCGTCTCTTTTCTGGAATTTGGT
ACCGAGGcgtaatgctctgccagtgttacaaccaattaaccaattctgattagaaaaactcatcgagcatcaaatgaaactgcaatttattc
atatcaggattatcaataccatatttttgaaaaagccgtttctgtaatgaaggagaaaactcaccgaggcagttccataggatggcaagatcctg
gtatcggtctgcgattccgactcgtccaacatcaatacaacctattaatttcccctcgtcaaaaataaggttatcaagtgagaaatcaccatgag
tgacgactgaatccggtgagaatggcaaaagcttatgcatttctttccagacttgttcaacaggccagccattacgctcgtcatcaaaatcactc
gcatcaaccaaaccgttattcattcgtgattgcgcctgagcgagacgaaatacgcgatcgctgttaaaaggacaattacaaacaggaatcgaatg
caaccggcgcaggaacactgccagcgcatcaacaatattttcacctgaatcaggatattcttctaatacctggaatgctgttttcccggggatcg
cagtggtgagtaaccatgcatcatcaggagtacggataaaatgcttgatggtcggaagaggcataaattccgtcagccagtttagtctgaccatc
tcatctgtaacatcattggcaacgctacctttgccatgtttcagaaacaactctggcgcatcgggcttcccatacaatcgatagattgtcgcacc
tgattgcccgacattatcgcgagcccatttatacccatataaatcagcatccatgttggaatttaatcgcggcctcgagcaagacgtttcccgtt
gaatatggctcataacaccccttgtattactgtttatgtaagcagacagttttattgttcatgatgatatatttttatcttgtgcaatgtaacat
cagagattttgagacacaacgtggctttgttgaataaatcgaacttttgctgagttgaaggatcagatcacgcatcttcccgacaacgcagaccg
ttccgtggcaaagcaaaagttcaaaatcaccaactggtccacctacaacaaagctctcatcaaccgtggctccctcactttctggctggatgatg
gggcgattcaggcctggtatgagtcagcaacaccttcttcacgaggcagacctcagcgc

[0350] In some embodiments, the nucleic acid sequence comprises a temperature sensitive promoter linked to a gene sequence encoding an ATP-binding cassette transporter polypeptide. In certain embodiments, the nucleic acid comprising the temperature sensitive promoter linked to a gene sequence encoding an ATP-binding cassette transporter polypeptide has at least about 80%, 85%, 90%, 95%, or 99% identity with Sequence AG. In some embodiments, the nucleic acid comprising the temperature sensitive promoter linked to a gene sequence encoding an ATP-binding cassette transporter polypeptide has at least about 85%, 86%, 87%, 88%, 89%, 90%, 91%, 92%, 93%, 94%, 95%, 96%, 97%, 98%, or 99% identity with Sequence AG. In some specific embodiments, the nucleic acid comprising the gene sequence encoding an ATP-binding cassette transporter polypeptide comprises Sequence M.1, M.2, and/or M.3 (ATP-binding cassette transporter) with a temperature sensitive element of any one of SEQ ID NO: 183-185. In other specific embodiments the nucleic acid comprising the human EGF gene sequence consists of Sequence M.1, M.2, and/or M.3 with a temperature sensitive promoter construct that further comprises a gene encoding mutant cI857 repressor that comprises any one of SEQ ID NO: 183-185.

Sequence AG (CI857-pR-prtDEF)
GTGTGAAATACCGCACAGATGCGTAAGGAGAAAATACCGCATCAGGCGCCAT
TCGCCATTCAGGCTGCGCAACTGTTGGGAAGGGCGATCGGTGCGGGCCTCTTCGCTAT
TACGCCAGCTTCAGCCAAACGTCTCTTCAGGCCACTGACTAGCGATAACTTTCCCCAC
AACGGAACAACTCTCATTGCATGGGATCATTGGGTACTGTGGGTTTAGTGGTTGTAAA
AACACCTGACCGCTATCCCTGATCAGTTTCTTGAAGGTAAACTCATCACCCCCAAGTC
TGGCTATGCAGAAATCACCTGGCTCAACAGCCTGCTCAGGGTCAACGAGAATTAACAT
TCCGTCAGGAAAGCTTGGCTTGGAGCCTGTTGGTGCGGTCATGGAATTACCTTCAACC
TCAAGCCAGAATGCAGAATCACTGGCTTTTTTGGTTGTGCTTACCCATCTCTCCGCATC
ACCTTTGGTAAAGGTTCTAAGCTTAGGTGAGAACATCCCTGCCTGAACATGAGAAAAA
ACAGGGTACTCATACTCACTTCTAAGTGACGGCTGCATACTAACCGCTTCATACATCT
CGTAGATTTCTCTGGCGATTGAAGGGCTAAATTCTTCAACGCTAACTTTGAGAATTTTT
GTAAGCAATGCGGCGTTATAAGCATTTAATGCATTGATGCCATTAAATAAAGCACCAA
CGCCTGACTGCCCCATCCCCATCTTGTCTGCGACAGATTCCTGGGATAAGCCAAGTTC
ATTTTTCTTTTTTTCATAAATTGCTTTAAGGCGACGTGCGTCCTCAAGCTGCTCTTGTGT
TAATGGTTTCTTTTTTGTGCTCATACGTTAAATCTATCACCGCAAGGGATAAATATCTA
ACACCGTGCGTGTTGACTATTTTACCTCTGGCGGTGATAATGGTTGCATAATCTTTGGA
TTTAAGGAGACCTCTatgaatgcttcctctgagcgagatcgttcgcttttcggcgtgctgagacagttccgccgcagtttctggag
cgtcgggattttcagcgccgtcatcaacgtgctgatgttagcgccttcggtatatatgctgcaggtgtatgaccgggtgctggcatcaggtaacg
gtatcaccctgctcatgctgactttactgatggcgggactgtgcgcatttatgggcgcgttagagtgggttcgtagtctgcttgtagtgaggctg
gtacccgtatcgatctcgcgctcaatcaggatgtctttaatgcggcatttgcccgtaatctggaggcaggtgatggccgcgccgggctggcgct
ggaccgacttaacgctgcttcgccagttcatcaccggcaacgcgcttttcgccttcttcgatgtgccatggtttccgctgtttctactggttctg
tttttgctgcacccatggctgggaatgctcgcgctgggaggcactgtggtgctagttgcgttagcctggctgaaccagcacctgaccaaccaacc
gcttgctgaagccaatcagcaatcacaacaggcgacccacttagctgacgctcagttgcgcaatgccgacgttattgaagcaatggggatgctgg
gtaacctgcgtcgacgctggcttgcgcgtcattaccgttttatttccctgcagaatcttgccagcgagcgtgccgccgcggttggcggtgcgtcc
aaatacagccgtattgcgttgcaatcattgatgctggggctgggagcactgctggcgatcgacggtaagatcacaccagggatgatgatcgccg
gtagcattttagttggtcgggtactgagtccgatcgatcagttaataggggtatggaaacagtggagctctgcgcgcattgcctggcaacgctta
acccggctgatcgccgcatatccgccgcgcccggcggcaatggctttacctgcgccggaagggcatctcagtgtggaacaggtctcacttcg
cacggtgcagggaaatacccgactgcaaaacatacatttttcgttgcaggctggcgaaacgctggtcattctcggcgcatctggttccggcaaa
tcctcgctggcgcgtttgctggtcggcgcgcagagtccgacacaaggtaaagttcgtctggatggcgctgatttgaatcaggtcgacaaaaac
acgtttggtccgaccattggttatttgccccaggacgtgcagttatttaagggctcgctcgctgaaaacatcgcacgttttggcgatgccgatcc
ggaaaaagttgtagcggcagcaaaacttgcgggggtacatgaactcattctgtctctacccaacggttatgacaccgaattgggtgatggcggc
ggcggtttgtctggcggccagagacagcgtatcggtctggcgcgcgctatgtacggcgatccttgtctgctgattctggatgaaccaaacgcc
agccttgacagcgaaggcgatcaagccctaatgcaggcgattgtcgcattgcagaaacgcggtgccactgttgtgttgattactcatcgcccg
gctttaacaacgctggctcaaaagattctgattctccacgagggccaacaacagcgtatgggactggcgcgcgatgtgctgacagaactgcaa
cagcgcagcgcagccaatcaggcacggatgaaccccacggccgcaatgcctcaataaGACCCACTTTTAAGGAGGTAT
TTAGatgacaggcatggatataaccactcaggatgaattaaacgaagcagcaatgcgcgatcgcgcttcacgtgatgaagagcgcgcatt
acggctgggctggtggctggtgctcgcgggtttcggtggttttctgctgtgggcattactggcgccgttagataaaggggtggcggtgcaagg
caacgtggtggtttcaggcaatcgtaaggtgatccaacacatgcagggcggcattgtcgatcggattcaggtgaaagacggcgaccgcgttg
ccgcaggtcaggttctcctgacgctgaatgcggtagatgcccgtaccaccagcgaagggctgggttcccaatatgatcaattaattgctcgcga
agccagactgctggcggaacagcgcaatcaatcgagtctggcggctacgccacgactggcgcaggcgcgtcagagaccggaaatggctg
ccattattgcgttgcaggaagatctacttcgtagccgtcagcaatcgctaaaactggaaatagatggagtccgcgccagcatcgatggactgga
gacttcgcttggcgcattgcaaaaggtgatgagttctaaacagtccgagcaggcaacgttgtctcagcaattacagggcctccggccgctggc
ggcggataactatgttccgcgtaacaagatgctggaaactgagcgtttgtttgctcaggtctctggcgaactggcccagacaagcggcgaggt
agggcgaacccgacgtgatattcagcagcaaaaattgaggatcgcccagcgtcagcaggaatacgacaaagaggtcaacagcgaattgtcc
gacgtacaagccaaactgaatgaggttatcagtcagcgcgagaaagcggatttcaatctggccaacgttcaggtccgtgcacctgttgccggc
accgtggtggatatgaagatcttcaccgaaggtggtgtgatcgcacccgggcaggtcatgatggacatcgttcccgaagaccaaccgctgctt
gttgatgggcgcattcctgtggaaatggtggacaaagtatggtcaggtcttccagtggaactccaattcaccgcgttttcacaaagcacaacgc
cgcgtgtaccgggaacggtcaccctgctttccgctgaccggctggtagacgaaaaagacggcactccgtactacggtctccgcattcaggtg
agcgaagaaggcaaacgcagtttgcatggtctggaaattaaaccaggtatgccggttcaggggtttgtccgcaccggagagcgttcgtttatca
attatctgtttaaacctctgatggatcgcatgcatcttgcgttaacggaagagtaaGTTAAGGTAGTTGGGGGAGGCAAT
Aatgcgaaggaaagcggtactactgacggttgttttatctctgtcatgcggcagcgcccaggcgatgggcctcctggatgcatgggaacttgc
acttcgtaatgacgcacaactgcgggcggccggtttcgaacgagacgccggtcaggaagaggtggcgatcggtcgcgctgggttgctgcca
tcgctgcaatatacctatggcgcaaattacagtcattccaaggtgacgcaacgcgatcggacgctgaataacacgactaaacgtgactacgata
actacgtatctacgcttacgctgcgtcagccgctgctggactatgcagcctgggcgcgctatcagcagggcgtcacccgcaaacttatggctg
atcagaggtttcgtgatcgtagtcaggacctgatggtgcgtttgtaccagtcctggagcgaagcattgctggcgcaggagaagcttatgctcctc
gatgcgcagcgccgtgcctatcaggagcagttagcgctgaaccgtcgcttattggctgcgggggaaggaactcaaacagacctgcgggaaa
cggaagcacgttacaccgtcactgaagcccaacgtatcgaacaggaagataccctggatgccgctatgacagatctcgaaaacatgatgggt
tcgccgctacaaattcaggatctgagtccacttgcgctggatacgttgccggataacgtaaccgaaaatcgctcgttatcacaatggcgcgaac
tgactgtgcggcacaatgcaaagctcgcggttcaacgtgaaaacgtcgattacagccgctatgaaattgagcgtaacagagccggccatctgc
ccacactggacctcgtggcgtccacccgcaacagcttgtccgaatctgaatataactacaaccagaaatacgacacccagaccgttggtttaca
ggtgagagtgccgctgtatagcggcggcgccgtttcggcatcaatgcgtcaggcagcggcggaataccagcaaagtcaggcggagctgga
taaccagacccgtcagacctttgcggaattacgccgtcagttcaacctgtgtgctaatggggccgcaaaaatccgagcctggcagatgagcgt
ggcagctgctgaggaagcgatccgcgcgacgcggcaaagcgtcgccggcggcgagcgcattaatctggacgttctgatggcggaacagg
agtggtataacgcccgccgcgagctgacagaagtcaaatatcgctggttacaggcctggctgaatttgcgttataccgccggaacactgaatg
agcaagatatgatgcaattggctgcctggtttcaatctgcgcctgtaattaataaaactggtataaataaaaccggaattaacgcagctaccggt
aataaaactaattaatacgcatggcatggatgaCCGATGGTAGTGTGGGGTCTCCCCATGCGAGAGTAGGG
AACTGCCAGGCATCAAATAAAACGAAAGGCTCAGTCGAAAGACTGGGCCTTTCGTTTT
ATCTGTTGTTTGTCGGTGAACGCTCTCCTGAGTAGGACAAATCCGCCGGGAGCGGATT
TGAACGTTGCGAAGCAACGGCCCGGAGGGTGGCGGGCAGGACGCCCGCCATAAACTG
CCAGGCATCAAATTAAGCAGAAGGCCATCCTGACGGATGGCCTTTTTGCGTGGCCAGT
GCCAAGCTTGCATGCGTGCCAGCTGCATTAATGAAGAAATCATGCTGGAAGAATAAG
CACCGACCGCAGCCACAGCGTGTAGCGCTCCCAGGCCGTCCACTCCCTGATCCGGCGC
TCATTCCACACAACATACGAGCCGGAAGCATAAAGTGTAAAGCCTGGGGTGCCTAAT
GAGTGAGCTAACTCACATTAATTGCGTTGCGCTCACTGCCCGCTTTCCAGTCGGGAAA
CCTGTCGTGCCAGCTGCATTAATGAATCGGCCAACGCGCGGGGAGAGGCGGTTTGCGT
ATTGGGCGCTCTTCCGCTTCCTCGCTCACTGACTCGCTGCGCTCGGTCGTTCGGCTGCG
GCGAGCGGTATCAGCTCACTCAAAGGCGGTAGTACGGGTTTTGCTGCCCGCAAACGG
GCTGTTCTGGTGTTGCTAGTTTGTTATCAGAATCGCAGATCCGGCTTCAGGTTTGCCGG
CTGAAAGCGCTATTTCTTCCAGAATTGCCATGATTTTTTCCCCACGGGAGGCGTCACTG
GCTCCCGTGTTGTCGGCAGCTTTGATTCGATAAGCAGCATCGCCTGTTTCAGGCTGTCT
ATGTGTGACTGTTGAGCTGTAACAAGTTGTCTCAGGTGTTCAATTTCATGTTCTAGTTG
CTTTGTTTTACTGGTTTCACCTGTTCTATTAGGTGTTACATGCTGTTCATCTGTTACATT
GTCGATCTGTTCATGGTGAACAGCTTTAAATGCACCAAAAACTCGTAAAAGCTCTGAT
GTATCTATCTTTTTTACACCGTTTTCATCTGTGCATATGGACAGTTTTCCCTTTGATATC
TAACGGTGAACAGTTGTTCTACTTTTGTTTGTTAGTCTTGATGCTTCACTGATAGATAC
AAGAGCCATAAGAACCTCAGATCCTTCCGTATTTAGCCAGTATGTTCTCTAGTGTGGT
TCGTTGTTTTTGCGTGAGCCATGAGAACGAACCATTGAGATCATGCTTACTTTGCATGT
CACTCAAAAATTTTGCCTCAAAACTGGTGAGCTGAATTTTTGCAGTTAAAGCATCGTG
TAGTGTTTTTCTTAGTCCGTTACGTAGGTAGGAATCTGATGTAATGGTTGTTGGTATTT
TGTCACCATTCATTTTTATCTGGTTGTTCTCAAGTTCGGTTACGAGATCCATTTGTCTAT
CTAGTTCAACTTGGAAAATCAACGTATCAGTCGGGCGGCCTCGCTTATCAACCACCAA
TTTCATATTGCTGTAAGTGTTTAAATCTTTACTTATTGGTTTCAAAACCCATTGGTTAA
GCCTTTTAAACTCATGGTAGTTATTTTCAAGCATTAACATGAACTTAAATTCATCAAGG
CTAATCTCTATATTTGCCTTGTGAGTTTTCTTTTGTGTTAGTTCTTTTAATAACCACTCA
TAAATCCTCATAGAGTATTTGTTTTCAAAAGACTTAACATGTTCCAGATTATATTTTAT
GAATTTTTTTAACTGGAAAAGATAAGGCAATATCTCTTCACTAAAAACTAATTCTAAT
TTTTCGCTTGAGAACTTGGCATAGTTTGTCCACTGGAAAATCTCAAAGCCTTTAACCA
AAGGATTCCTGATTTCCACAGTTCTCGTCATCAGCTCTCTGGTTGCTTTAGCTAATACA
CCATAAGCATTTTCCCTACTGATGTTCATCATCTGAGCGTATTGGTTATAAGTGAACGA
TACCGTCCGTTCTTTCCTTGTAGGGTTTTCAATCGTGGGGTTGAGTAGTGCCACACAGC
ATAAAATTAGCTTGGTTTCATGCTCCGTTAAGTCATAGCGACTAATCGCTAGTTCATTT
GCTTTGAAAACAACTAATTCAGACATACATCTCAATTGGTCTAGGTGATTTTAATCAC
TATACCAATTGAGATGGGCTAGTCAATGATAATTACTAGTCCTTTTCCTTTGAGTTGTG
GGTATCTGTAAATTCTGCTAGACCTTTGCTGGAAAACTTGTAAATTCTGCTAGACCCTC
TGTAAATTCCGCTAGACCTTTGTGTGTTTTTTTTGTTTATATTCAAGTGGTTATAATTTA
TAGAATAAAGAAAGAATAAAAAAAGATAAAAAGAATAGATCCCAGCCCTGTGTATAA
CTCACTACTTTAGTCAGTTCCGCAGTATTACAAAAGGATGTCGCAAACGCTGTTTGCT
CCTCTACAAAACAGACCTTAAAACCCTAAAGGCTTAAGTAGCACCCTCGCAAGCTCG
ggcaaatcgctgaatattccttttgtctccgaccatc

[0351] The nucleic acid may be present on a plasmid or chromosome in the bacterial cell. In one embodiment, the nucleic acid is located on a plasmid in the bacterial cell. In another embodiment, the nucleic acid is located in the chromosome of the bacterial cell. In yet another embodiment, a native copy of the nucleic acid is located in the chromosome of the bacterial cell.

### Multiple Mechanisms of Action

[0352] In some embodiments, the bacteria are genetically engineered to include multiple mechanisms of action (MOAs), e.g., circuits producing multiple copies of the same product (e.g., to enhance copy number) or circuits performing multiple different functions. Examples of insertion sites include, but are not limited to, malE/K, insB/I, araC/BAD, lacZ, dapA, cea. For example, the recombinant bacteria may include four copies of EGF inserted at four different insertion sites, e.g., malE/K, insB/I, araC/BAD, and lacZ. Alternatively, the recombinant bacteria may include three copies of EGF inserted at three different insertion sites, e.g., malE/K, insB/I, and lacZ.

[0353] In some embodiments, the bacteria are genetically engineered to include multiple mechanisms of action (MOAs), e.g., circuits producing multiple copies of the same product (e.g., to enhance copy number) or circuits performing multiple different functions. For example, the recombinant bacteria may include four copies of the gene, gene(s), or gene cassettes for producing the payload(s) inserted at four different insertion sites. Alternatively, the recombinant bacteria may include three copies of the gene, gene(s), or gene cassettes for producing the payload(s) inserted at three different insertion sites and three copies of the gene, gene(s), or gene cassettes for producing the payload(s) inserted at three different insertion sites.

[0354] In some embodiments, under conditions where the gene, gene(s), or gene cassettes for producing the payload(s) is expressed, the recombinant bacteria of the disclosure produce at least about 1.5-fold, at least about 2-fold, at least about 10-fold, at least about 15-fold, at least about 20-fold, at least about 30-fold, at least about 50-fold, at least about 100-fold, at least about 200-fold, at least about 300-fold, at least about 400-fold, at least about 500-fold, at least about 600-fold, at least about 700-fold, at least about 800-fold, at least about 900-fold, at least about 1,000-fold, or at least about 1,500-fold more of the payload(s) as compared to unmodified bacteria of the same subtype under the same conditions.

[0355] In some embodiments, the recombinant bacteria produce at least about 1.5-fold, at least about 2-fold, at least about 10-fold, at least about 15-fold, at least about 20-fold, at least about 30-fold, at least about 50-fold, at least about 100-fold, at least about 200-fold, at least about 300-fold, at least about 400-fold, at least about 500-fold, at least about 600-fold, at least about 700-fold, at least about 800-fold, at least about 900-fold, at least about 1,000-fold, or at least about 1,500-fold more of a payload under inducing conditions than unmodified bacteria of the same subtype under the same conditions. Certain unmodified bacteria will not have detectable levels of the payload. In embodiments using genetically modified forms of these bacteria, the payload will be detectable under inducing conditions.

[0356] In some embodiments, quantitative PCR (qPCR) is used to amplify, detect, and/or quantify mRNA expression levels of the gene, gene(s), or gene cassettes for producing the payload(s). Primers may be designed and used to detect mRNA in a sample according to methods known in the art. In some embodiments, a fluorophore is added to a sample reaction mixture that may contain payload RNA, and a thermal cycler is used to illuminate the sample reaction mixture with a specific wavelength of light and detect the subsequent emission by the fluorophore. The reaction mixture is heated and cooled to predetermined temperatures for predetermined time periods. In certain embodiments, the heating and cooling is repeated for a predetermined number of cycles. In some embodiments, the reaction mixture is heated and cooled to 90-100° C., 60-70° C., and 30-50° C. for a predetermined number of cycles. In a certain embodiment, the reaction mixture is heated and cooled to 93-97° C., 55-65° C., and 35-45° C. for a predetermined number of cycles. In some embodiments, the accumulating amplicon is quantified after each cycle of the qPCR. The number of cycles at which fluorescence exceeds the threshold is the threshold cycle (CT). At least one CT result for each sample is generated, and the CT result(s) may be used to determine mRNA expression levels of the payload(s).

[0357] The gene sequence(s) encoding EGF peptides for secretion may be expressed under the control of a constitutive promoter or an inducible promoter. The gene sequence(s) encoding the one or more EGF peptides for secretion are expressed under the control of a promoter that is directly or indirectly induced by exogenous environmental conditions, e.g., low-oxygen or anaerobic conditions, wherein expression of the gene sequence(s) encoding the one or more EGF peptides for secretion are activated under low-oxygen or anaerobic environments, such as the environment of the mammalian gut. The gene sequence(s) encoding the one or more EGF peptides for secretion are expressed under the control of a temperature-sensitive promoter. Alternatively, the gene sequence(s) encoding the one or more EGF peptides for secretion are expressed under the control of a promoter that is directly or indirectly induced by inflammatory conditions. Exemplary inducible promoters described herein include oxygen level-dependent promoters (e.g., FNR-inducible promoter), promoters induced by inflammation or an inflammatory response (RNS, ROS promoters), and promoters induced by a metabolite that may or may not be naturally present (e.g., can be exogenously added) in the gut, e.g., arabinose and tetracycline. Examples of inducible promoters include, but are not limited to, an FNR responsive promoter, a P_{araC} promoter, a P_{araBAD} promoter, and a P_{TetR} promoter, each of which are described in more detail herein. Inducible promoters are described in more detail infra.

[0358] The at least one gene encoding EGF for secretion may be present on a plasmid or chromosome in the bacterial cell. In one embodiment, a native copy of the gene sequence(s) encoding EGF for secretion are located in the chromosome of the bacterial cell, and at least one gene encoding EGF for secretion from a different species of bacteria are located on a plasmid in the bacterial cell. In yet another embodiment, a native copy of the gene sequence(s) encoding EGF for secretion are located on a plasmid in the bacterial cell, and at least one gene encoding EGF for secretion from a different species of bacteria are located on a plasmid in the bacterial cell. In yet another embodiment, a native copy of the gene sequence(s) encoding EGF for secretion are located in the chromosome of the bacterial cell, and at least one gene encoding EGF for secretion from a different species of bacteria are located in the chromosome of the bacterial cell.

[0359] In some embodiments, the gene sequence(s) encoding the one or more EGF peptides for secretion are expressed on a low-copy plasmid. In some embodiments, the gene sequence(s) encoding the one or more EGF peptides for secretion are expressed on a high-copy plasmid. In some embodiments, the high-copy plasmid may be useful for increasing expression of EGF for secretion.

[0360] In some embodiments, a recombinant bacterial cell comprising at least one gene encoding EGF for secretion are expressed on a high-copy plasmid do not increase tryptophan catabolism as compared to a recombinant bacterial cell comprising the same gene expressed on a low-copy plasmid in the absence of a heterologous importer of tryptophan and/or its metabolites and additional copies of a native importer of tryptophan and/or its metabolites. In alternate embodiments, the importer of tryptophan and/or its metabolites is used in conjunction with a high-copy plasmid.

[0361] In some embodiments, the recombinant bacteria described above further comprise one or more of the modifications, mutations, and/or deletions in endogenous genes described herein.

[0362] In some embodiments, the genetically engineered microorganism further comprises a mutation and/or deletion in ldhA. In some embodiments, the genetically engineered microorganism further comprises a mutation and/or deletion in frdA. In some embodiments, the genetically engineered microorganism further comprises a mutation and/or deletion in adhE. In some embodiments, the genetically engineered microorganism further comprises a mutation and/or deletion in one or more of ldhA, frdA, and adhE.

[0363] In some embodiments, surface display could be used to display EGF on the surface of the genetically modified bacterium. In some embodiments, the recombinant bacteria and/or microorganisms encode one or more gene(s) and/or gene cassette(s) encoding EGF, which is anchored or displayed on the surface of the bacteria and/or microorganisms.

### Induction of Payloads During Strain Culture

[0364] In some embodiments, it is desirable to pre-induce payload or EGF expression and/or payload activity prior to administration. Such payload or EGF may be an effector intended for secretion or may be an enzyme which catalyzes a metabolic reaction to produce an effector. In other embodiments, the protein of interest is an enzyme which catabolizes a harmful metabolite. In such situations, the strains are pre-loaded with active payload or EGF. In such instances, the recombinant bacteria express EGF, under conditions provided in bacterial culture during cell growth, expansion, purification, fermentation, and/or manufacture prior to administration in vivo. Such culture conditions can be provided in a flask, fermenter or other appropriate culture vessel, e.g., used during cell growth, cell expansion, fermentation, recovery, purification, formulation, and/or manufacture. As used herein, the term “bacterial culture” or bacterial cell culture” or “culture” refers to bacterial cells or microorganisms, which are maintained or grown in vitro during several production processes, including cell growth, cell expansion, recovery, purification, fermentation, and/or manufacture. As used herein, the term “fermentation” refers to the growth, expansion, and maintenance of bacteria under defined conditions. Fermentation may occur under a number of cell culture conditions, including anaerobic or low oxygen or oxygenated conditions, in the presence of inducers, nutrients, at defined temperatures, and the like.

[0365] Culture conditions are selected to achieve optimal activity and viability of the cells, while maintaining a high cell density (high biomass) yield. A number of cell culture conditions and operating parameters are monitored and adjusted to achieve optimal activity, high yield and high viability, including oxygen levels (e.g., low oxygen, microaerobic, aerobic), temperature of the medium, and nutrients and/or different growth media, chemical and/or nutritional inducers and other components provided in the medium.

[0366] In some embodiments, EGF and are directly or indirectly induced, while the strains is grown up for in vivo administration. Without wishing to be bound by theory, pre-induction may boost in vivo activity. This is particularly important in proximal regions of the gut which are reached first by the bacteria, e.g., the small intestine. If the bacterial residence time in this compartment is relatively short, the bacteria may pass through the small intestine without reaching full in vivo induction capacity. In contrast, if a strain is pre-induced and preloaded, the strains are already fully active, allowing for greater activity more quickly as the bacteria reach the intestine. Ergo, no transit time is “wasted”, in which the strain is not optimally active. As the bacteria continue to move through the intestine, in vivo induction occurs under environmental conditions of the gut (e.g., low oxygen, or in the presence of gut metabolites).

[0367] In one embodiment, expression of one or more payload(s), is induced during cell growth, cell expansion, fermentation, recovery, purification, formulation, and/or manufacture. In one embodiment, expression EGF is induced during cell growth, cell expansion, fermentation, recovery, purification, formulation, and/or manufacture. In one embodiment, expression of one or more payload(s), is driven from the same promoter as a multicistronic message. In one embodiment, expression of one or more payload(s) is driven from the same promoter as two or more separate messages. In one embodiment, expression of one or more payload(s) is driven from the one or more different promoters.

[0368] In some embodiments, the strains are administered without any pre-induction protocols during strain growth prior to in vivo administration.

### Anaerobic Induction

[0369] In some embodiments, cells are induced under anaerobic or low oxygen conditions in culture. In such instances, cells are grown (e.g., for 1.5 to 3 hours) until they have reached a certain OD, e.g., ODs within the range of 0.1 to 10, indicating a certain density e.g., ranging from 1×10\hat{ }8 to 1×10\hat{ }11, and exponential growth and are then switched to anaerobic or low oxygen conditions for approximately 3 to 5 hours. In some embodiments, strains are induced under anaerobic or low oxygen conditions, e.g., to induce FNR promoter activity and drive expression of one or more payload(s) under the control of one or more FNR promoters.

[0370] In one embodiment, expression of one or more payload(s), is under the control of one or more anaerobic or low oxygen inducible promoter(s), e.g., FNR promoter(s), and is induced during cell growth, cell expansion, fermentation, recovery, purification, formulation, and/or manufacture under anaerobic or low oxygen conditions. In one embodiment, expression of EGF is under the control of one or more anaerobic or low oxygen inducible promoter(s), e.g., FNR promoter(s) and is induced during cell growth, cell expansion, fermentation, recovery, purification, formulation, and/or manufacture under anaerobic or low oxygen conditions.

[0371] In one embodiment, expression of two or more payload(s), is under the control of one or more anaerobic or low oxygen inducible promoter(s), e.g., FNR promoter(s), and is driven from the same promoter in the form of a multicistronic message under anaerobic or low oxygen conditions. In one embodiment, expression of one or more payload(s), is under the control of one or more anaerobic or low oxygen inducible promoter(s), e.g., FNR promoter(s), and is driven from the same promoter as two or more separate messages under anaerobic or low oxygen conditions. In one embodiment, expression of one or more payload(s) under the control of one or more anaerobic or low oxygen inducible promoter(s), e.g., FNR promoter(s), and is driven from the one or more different promoters under anaerobic or low oxygen conditions.

[0372] Without wishing to be bound by theory, strains that comprise one or more payload(s) under the control of an FNR promoter, may allow expression of payload(s) from these promoters in vitro, under anaerobic or low oxygen culture conditions, and in vivo, under the low oxygen conditions found in the gut.

[0373] In some embodiments, promoters inducible by arabinose, IPTG, rhamnose, tetracycline, and/or other chemical and/or nutritional inducers can be induced under anaerobic or low oxygen conditions in the presence of the chemical and/or nutritional inducer. In some embodiments, strains may comprise a combination of gene sequence(s), some of which are under control of FNR promoters and others which are under control of promoters induced by chemical and/or nutritional inducers. In some embodiments, strains may comprise one or more payload gene sequence(s) under the control of one or more FNR promoter(s) and one or more payload gene sequence(s) which are induced by a one or more chemical and/or nutritional inducer(s), including, but not limited to, arabinose, IPTG, rhamnose, tetracycline, and/or other chemical and/or nutritional inducers described herein or known in the art. In some embodiments, strains may comprise one or more payload gene sequence(s) and/or under the control of one or more FNR promoter(s), and one or more payload gene sequence(s) under the control of a one or more constitutive promoter(s) described herein. In some embodiments, strains may comprise one or more payload gene sequence(s) under the control of an FNR promoter and one or more payload gene sequence(s) under the control of a one or more thermoregulated promoter(s) described herein.

[0374] In one embodiment, expression of one or more payload gene sequence(s) is under the control of one or more promoter(s) regulated by chemical and/or nutritional inducers and is induced during cell growth, cell expansion, fermentation, recovery, purification, formulation, and/or manufacture under anaerobic and/or low oxygen conditions. In one embodiment, the chemical and/or nutritional inducer is arabinose and the promoter is inducible by arabinose. In one embodiment, the chemical and/or nutritional inducer is IPTG and the promoter is inducible by IPTG. In one embodiment, the chemical and/or nutritional inducer is rhamnose and the promoter is inducible by rhamnose. In one embodiment, the chemical and/or nutritional inducer is tetracycline and the promoter is inducible by tetracycline.

[0375] In one embodiment, expression of one or more payload(s), is under the control of one or more promoter(s) regulated by chemical and/or nutritional inducers and is driven from the same promoter in the form of a multicistronic message under anaerobic and/or low oxygen conditions. In one embodiment, expression of one or more payload(s), is under the control of one or more promoter(s) regulated by chemical and/or nutritional inducers and is driven from the same promoter as two or more separate messages under anaerobic and/or low oxygen conditions. In one embodiment, expression of one or more payload(s), is under the control of one or more promoter(s) regulated by chemical and/or nutritional inducers and is driven from the one or more different promoters under anaerobic and/or low oxygen conditions.

[0376] In one embodiment, strains may comprise a combination of gene sequence(s), some of which are under control of a first inducible promoter and others which are under control of a second inducible promoter, both induced by chemical and/or nutritional inducers, under anaerobic or low oxygen conditions. In one embodiment, strains may comprise a combination of gene sequence(s), some of which are under control of a first inducible promoter and others which are under control of a second inducible promoter, both induced by chemical and/or nutritional inducers. In some embodiments, the strains comprise gene sequence(s) under the control of a a third inducible promoter, e.g., an anaerobic/low oxygen promoter, e.g., FNR promoter. In one embodiment, strains may comprise a combination of gene sequence(s), some of which are under control of a first inducible promoter, e.g., a chemically induced promoter or a low oxygen promoter and others which are under control of a second inducible promoter, e.g., a temperature sensitive promoter. In one embodiment, strains may comprise a combination of gene sequence(s), some of which are under control of a first inducible promoter, e.g., a FNR promoter and others which are under control of a second inducible promoter, e.g., a temperature sensitive promoter. In one embodiment, strains may comprise a combination of gene sequence(s), some of which are under control of a first inducible promoter, e.g., a chemically induced and others which are under control of a second inducible promoter, e.g., a temperature sensitive promoter. In some embodiments, strains may comprise one or more payload gene sequence(s) under the control of an FNR promoter and one or more payload gene sequence(s) under the control of a one or more promoter(s) which are induced by a one or more chemical and/or nutritional inducer(s), including, but not limited to, by arabinose, IPTG, rhamnose, tetracycline, and/or other chemical and/or nutritional inducers described herein or known in the art. Additionally the strains may comprise a construct which is under thermoregulatory control. In some embodiments, the bacteria strains further comprise payload sequence(s) under the control of one or more constitutive promoter(s) active under low oxygen conditions.

### Aerobic Induction

[0377] In some embodiments, it is desirable to prepare, pre-load and pre-induce the strains under aerobic conditions. This allows more efficient growth and viability, and, in some cases, reduces the build-up of toxic metabolites. In such instances, cells are grown (e.g., for 1.5 to 3 hours) until they have reached a certain OD, e.g., ODs within the range of 0.1 to 10, indicating a certain density e.g., ranging from 1×10\hat{ }8 to 1×10\hat{ }11, and exponential growth and are then induced through the addition of the inducer or through other means, such as shift to a permissive temperature, for approximately 3 to 5 hours.

[0378] In some embodiments, promoters inducible by arabinose, IPTG, rhamnose, tetracycline, and/or other chemical and/or nutritional inducers described herein or known in the art can be induced under aerobic conditions in the presence of the chemical and/or nutritional inducer during cell growth, cell expansion, fermentation, recovery, purification, formulation, and/or manufacture. In one embodiment, expression of one or more payload(s) is under the control of one or more promoter(s) regulated by chemical and/or nutritional inducers and is induced during cell growth, cell expansion, fermentation, recovery, purification, formulation, and/or manufacture under aerobic conditions.

[0379] In one embodiment, expression of one or more payload(s), is under the control of one or more promoter(s) regulated by chemical and/or nutritional inducers and is driven from the same promoter in the form of a multicistronic message under aerobic conditions. In one embodiment, expression of one or more payload(s), is under the control of one or more promoter(s) regulated by chemical and/or nutritional inducers and is driven from the same promoter as two or more separate messages under aerobic conditions. In one embodiment, expression of one or more payload(s), is under the control of one or more promoter(s) regulated by chemical and/or nutritional inducers and is driven from the one or more different promoters under aerobic conditions.

[0380] In one embodiment, the chemical and/or nutritional inducer is arabinose and the promoter is inducible by arabinose. In one embodiment, the chemical and/or nutritional inducer is IPTG and the promoter is inducible by IPTG. In one embodiment, the chemical and/or nutritional inducer is rhamnose and the promoter is inducible by rhamnose. In one embodiment, the chemical and/or nutritional inducer is tetracycline and the promoter is inducible by tetracycline.

[0381] In some embodiments, promoters regulated by temperature are induced during cell growth, cell expansion, fermentation, recovery, purification, formulation, and/or manufacture. In one embodiment, expression of one or more payload(s) is driven directly or indirectly by one or more thermoregulated promoter(s) and is induced during cell growth, cell expansion, fermentation, recovery, purification, formulation, and/or manufacture under aerobic conditions.

[0382] In one embodiment, expression of one or more payload(s) is driven directly or indirectly by one or more thermoregulated promoter(s) and is driven from the same promoter in the form of a multicistronic message under aerobic conditions. In one embodiment, expression of one or more payload(s) is driven directly or indirectly by one or more thermoregulated promoter(s) and is driven from the same promoter as two or more separate messages under aerobic conditions. In one embodiment, expression of one or more payload(s) is driven directly or indirectly by one or more thermoregulated promoter(s) and is driven from the one or more different promoters under aerobic conditions.

[0383] In one embodiment, strains may comprise a combination of gene sequence(s), some of which are under control of a first inducible promoter and others which are under control of a second inducible promoter, both induced under aerobic conditions. In some embodiments, a strain comprises three or more different promoters which are induced under aerobic culture conditions.

[0384] In one embodiment, strains may comprise a combination of gene sequence(s), some of which are under control of a first inducible promoter and others which are under control of a second inducible promoter, both induced by chemical and/or nutritional inducers. In one embodiment, strains may comprise a combination of gene sequence(s), some of which are under control of a first inducible promoter, e.g., a chemically inducible promoter, and others which are under control of a second inducible promoter, e.g., a temperature sensitive promoter under aerobic culture conditions. In some embodiments two or more chemically induced promoter gene sequence(s) are combined with a thermoregulated construct described herein. In one embodiment, the chemical and/or nutritional inducer is arabinose and the promoter is inducible by arabinose. In one embodiment, the chemical and/or nutritional inducer is IPTG and the promoter is inducible by IPTG. In one embodiment, the chemical and/or nutritional inducer is rhamnose and the promoter is inducible by rhamnose. In one embodiment, the chemical and/or nutritional inducer is tetracycline and the promoter is inducible by tetracycline.

[0385] In one embodiment, strains may comprise a combination of gene sequence(s), some of which are under control of a first inducible promoter, e.g., a FNR promoter and others which are under control of a second inducible promoter, e.g., a temperature sensitive promoter. In one embodiment, strains may comprise a combination of gene sequence(s), some of which are under control of a first inducible promoter, e.g., a chemically induced and others which are under control of a second inducible promoter, e.g., a temperature sensitive promoter. In some embodiments, strains may comprise one or more payload gene sequence(s) under the control of an FNR promoter and one or more payload gene sequence(s) under the control of a one or more promoter(s) which are induced by a one or more chemical and/or nutritional inducer(s), including, but not limited to, by arabinose, IPTG, rhamnose, tetracycline, and/or other chemical and/or nutritional inducers described herein or known in the art. Additionally the strains may comprise a construct which is under thermoregulatory control. In some embodiments, the bacteria strains further comprise payload sequences under the control of one or more constitutive promoter(s) active under aerobic conditions.

[0386] In some embodiments, genetically engineered strains comprise gene sequence(s) which are induced under aerobic culture conditions. In some embodiments, these strains further comprise FNR inducible gene sequence(s) for in vivo activation in the gut. In some embodiments, these strains do not further comprise FNR inducible gene sequence(s) for in vivo activation in the gut.

[0387] In some embodiments, genetically engineered strains comprise gene sequence(s), which are arabinose inducible under aerobic culture conditions. In some embodiments, these strains do not further comprise FNR inducible gene sequence(s) for in vivo activation in the gut.

[0388] In some embodiments, genetically engineered strains comprise gene sequence(s), which are IPTG inducible under aerobic culture conditions. In some embodiments, these strains further comprise FNR inducible gene sequence(s) for in vivo activation in the gut. In some embodiments, these strains do not further comprise FNR inducible gene sequence(s) for in vivo activation in the gut.

[0389] In some embodiments, genetically engineered strains comprise gene sequence(s) which are arabinose inducible under aerobic culture conditions. In some embodiments, such a strain further comprises sequence(s) which are IPTG inducible under aerobic culture conditions. In some embodiments, these strains further comprise FNR inducible gene payload sequence(s) for in vivo activation in the gut. In some embodiments, these strains do not further comprise FNR inducible gene sequence(s) for in vivo activation in the gut.

[0390] As evident from the above non-limiting examples, genetically engineered strains comprise inducible gene sequence(s) which can be induced numerous combinations. For example, rhamnose or tetracycline can be used as an inducer with the appropriate promoters in addition or in lieu of arabinose and/or IPTG or with thermoregulation. Additionally, such bacterial strains can also be induced with the chemical and/or nutritional inducers under anaerobic conditions.

### Microaerobic Induction

[0391] In some embodiments, viability, growth, and activity are optimized by pre-inducing the bacterial strain under microaerobic conditions. In some embodiments, microaerobic conditions are best suited to “strike a balance” between optimal growth, activity and viability conditions and optimal conditions for induction; in particular, if the expression of the one or more payload(s) are driven by an anaerobic and/or low oxygen promoter, e.g., a FNR promoter. In such instances, cells are grown (e.g., for 1.5 to 3 hours) until they have reached a certain OD, e.g., ODs within the range of 0.1 to 10, indicating a certain density e.g., ranging from 1×10\hat{ }8 to 1×10\hat{ }11, and exponential growth and are then induced through the addition of the inducer or through other means, such as shift to at a permissive temperature, for approximately 3 to 5 hours.

[0392] In one embodiment, expression of one or more payload(s) is under the control of one or more FNR promoter(s) and is induced during cell growth, cell expansion, fermentation, recovery, purification, formulation, and/or manufacture under microaerobic conditions.

[0393] In one embodiment, expression of one or more payload(s), is under the control of one or more FNR promoter(s) and is driven from the same promoter in the form of a multicistronic message under microaerobic conditions. In one embodiment, expression of one or more payload(s), is under the control of one or more FNR promoter(s) and is driven from the same promoter as two or more separate messages under microaerobic conditions. In one embodiment, expression of one or more payload(s), is under the control of one or more FNR promoter(s) and is driven from the one or more different promoters under microaerobic conditions.

[0394] Without wishing to be bound by theory, strains that comprise one or more payload(s) under the control of an FNR promoter, may allow expression of payload(s) from these promoters in vitro, under microaerobic culture conditions, and in vivo, under the low oxygen conditions found in the gut.

[0395] In some embodiments, promoters inducible by arabinose, IPTG, rhamnose, tetracycline, and/or other chemical and/or nutritional inducers can be induced under microaerobic conditions in the presence of the chemical and/or nutritional inducer. In particular, strains may comprise a combination of gene sequence(s), some of which are under control of FNR promoters and others which are under control of promoters induced by chemical and/or nutritional inducers. In some embodiments, strains may comprise one or more payload gene sequence(s) sequence(s) under the control of one or more FNR promoter(s) and one or more payload gene sequence(s) under the control of a one or more promoter(s) which are induced by a one or more chemical and/or nutritional inducer(s), including, but not limited to, arabinose, IPTG, rhamnose, tetracycline, and/or other chemical and/or nutritional inducers described herein or known in the art. In some embodiments, strains may comprise one or more payload gene sequence(s) under the control of one or more FNR promoter(s), and one or more payload gene sequence(s) under the control of a one or more constitutive promoter(s) described herein. In some embodiments, strains may comprise one or more payload gene sequence(s) under the control of an FNR promoter and one or more payload gene sequence(s) under the control of a one or more thermoregulated promoter(s) described herein.

[0396] In one embodiment, expression of one or more payload(s) is under the control of one or more promoter(s) regulated by chemical and/or nutritional inducers and is induced during cell growth, cell expansion, fermentation, recovery, purification, formulation, and/or manufacture under microaerobic conditions.

[0397] In one embodiment, expression of one or more payload(s), is under the control of one or more promoter(s) regulated by chemical and/or nutritional inducers and is driven from the same promoter in the form of a multicistronic message under microaerobic conditions. In one embodiment, expression of one or more payload(s), is under the control of one or more promoter(s) regulated by chemical and/or nutritional inducers and is driven from the same promoter as two or more separate messages under microaerobic conditions. In one embodiment, expression of one or more payload(s), is under the control of one or more promoter(s) regulated by chemical and/or nutritional inducers and is driven from the one or more different promoters under microaerobic conditions.

[0398] In one embodiment, strains may comprise a combination of gene sequence(s), some of which are under control of a first inducible promoter and others which are under control of a second inducible promoter, both induced by chemical and/or nutritional inducers, under microaerobic conditions. In one embodiment, strains may comprise a combination of gene sequence(s), some of which are under control of a first inducible promoter and others which are under control of a second inducible promoter, both induced by chemical and/or nutritional inducers. In some embodiments, the strains comprise gene sequence(s) under the control of a third inducible promoter, e.g., an anaerobic/low oxygen promoter or microaerobic promoter, e.g., FNR promoter. In one embodiment, strains may comprise a combination of gene sequence(s), some of which are under control of a first inducible promoter, e.g., a chemically induced promoter or a low oxygen or microaerobic promoter and others which are under control of a second inducible promoter, e.g., a temperature sensitive promoter. In one embodiment, strains may comprise a combination of gene sequence(s), some of which are under control of a first inducible promoter, e.g., a FNR promoter and others which are under control of a second inducible promoter, e.g., a temperature sensitive promoter. In one embodiment, strains may comprise a combination of gene sequence(s), some of which are under control of a first inducible promoter, e.g., a chemically induced and others which are under control of a second inducible promoter, e.g., a temperature sensitive promoter. In some embodiments, strains may comprise one or more payload gene sequence(s) under the control of an FNR promoter and one or more payload gene sequence(s) under the control of a one or more promoter(s) which are induced by a one or more chemical and/or nutritional inducer(s), including, but not limited to, by arabinose, IPTG, rhamnose, tetracycline, and/or other chemical and/or nutritional inducers described herein or known in the art. Additionally the strains may comprise a construct which is under thermoregulatory control. In some embodiments, the bacteria strains further comprise payload under the control of one or more constitutive promoter(s) active under low oxygen conditions.

Induction of Strains Using Phasing, Pulsing and/or Cycling

[0399] In some embodiments, cycling, phasing, or pulsing techniques are employed during cell growth, expansion, recovery, purification, fermentation, and/or manufacture to efficiently induce and grow the strains prior to in vivo administration. This method is used to “strike a balance” between optimal growth, activity, cell health, and viability conditions and optimal conditions for induction; in particular, if growth, cell health or viability are negatively affected under inducing conditions. In such instances, cells are grown (e.g., for 1.5 to 3 hours) in a first phase or cycle until they have reached a certain OD, e.g., ODs within the range of 0.1 to 10, indicating a certain density e.g., ranging from 1×10\hat{ }8 to 1×10\hat{ }11, and are then induced through the addition of the inducer or through other means, such as shift to a permissive temperature (if a promoter is thermoregulated), or change in oxygen levels (e.g., reduction of oxygen level in the case of induction of an FNR promoter driven construct) for approximately 3 to 5 hours. In a second phase or cycle, conditions are brought back to the original conditions which support optimal growth, cell health and viability. Alternatively, if a chemical and/or nutritional inducer is used, then the culture can be spiked with a second dose of the inducer in the second phase or cycle.

[0400] In some embodiments, two cycles of optimal conditions and inducing conditions are employed (i.e, growth, induction, recovery and growth, induction). In some embodiments, three cycles of optimal conditions and inducing conditions are employed. In some embodiments, four or more cycles of optimal conditions and inducing conditions are employed. In a non-liming example, such cycling and/or phasing is used for induction under anaerobic and/or low oxygen conditions (e.g., induction of FNR promoters). In one embodiment, cells are grown to the optimal density and then induced under anaerobic and/or low oxygen conditions. Before growth and/or viability are negatively impacted due to stressful induction conditions, cells are returned to oxygenated conditions to recover, after which they are then returned to inducing anaerobic and/or low oxygen conditions for a second time. In some embodiments, these cycles are repeated as needed.

[0401] In some embodiments, growing cultures are spiked once with the chemical and/or nutritional inducer. In some embodiments, growing cultures are spiked twice with the chemical and/or nutritional inducer. In some embodiments, growing cultures are spiked three or more times with the chemical and/or nutritional inducer. In a non-limiting example, cells are first grown under optimal growth conditions up to a certain density, e.g., for 1.5 to 3 hour, to reach an OD of 0.1 to 10, until the cells are at a density ranging from 1×10\hat{ }8 to 1×10\hat{ }11. Then the chemical inducer, e.g., arabinose or IPTG, is added to the culture. After 3 to 5 hours, an additional dose of the inducer is added to re-initiate the induction. Spiking can be repeated as needed.

[0402] In some embodiments, phasing or cycling changes in temperature in the culture. In another embodiment, adjustment of temperature may be used to improve the activity of a payload. For example, lowering the temperature during culture may improve the proper folding of the payload. In such instances, cells are first grown at a temperature optimal for growth (e.g., 37 C). In some embodiments, the cells are then induced, e.g., by a chemical inducer, to express the payload. Concurrently or after a set amount of induction time, the temperature in the media is lowered, e.g., between 25 and 35 C, to allow improved folding of the expressed payload.

[0403] In some embodiments, payload(s) are under the control of different inducible promoters, for example two different chemical inducers. In other embodiments, the payload is induced under low oxygen conditions or microaerobic conditions and a second payload is induced by a chemical inducer.

[0404] In one embodiment, expression of one or more payload(s) is under the control of one or more FNR promoter(s) and is induced during cell growth, cell expansion, fermentation, recovery, purification, formulation, and/or manufacture by using phasing or cycling or pulsing or spiking techniques.

[0405] In one embodiment, expression of one or more payload(s), is under the control of one or more FNR promoter(s) and is driven from the same promoter in the form of a multicistronic message through the employment of phasing or cycling or pulsing or spiking techniques. In one embodiment, expression of one or more payload(s), is under the control of one or more FNR promoter(s) and is driven from the same promoter as two or more separate messages through the employment of phasing or cycling or pulsing or spiking techniques. In one embodiment, expression of one or more payload(s), is under the control of one or more FNR promoter(s) and is driven from the one or more different promoters through the employment of phasing or cycling or pulsing or spiking techniques.

[0406] In some embodiments, promoters inducible by arabinose, IPTG, rhamnose, tetracycline, and/or other chemical and/or nutritional inducers can be induced through the employment of phasing or cycling or pulsing or spiking techniques in the presence of the chemical and/or nutritional inducer. In particular, strains may comprise a combination of gene sequence(s), some of which are under control of FNR promoters and others which are under control of promoters induced by chemical and/or nutritional inducers. In some embodiments, strains may comprise one or more payload gene sequence(s) under the control of one or more FNR promoter(s) and one or more payload gene sequence(s) under the control of a one or more promoter(s) which are induced by a one or more chemical and/or nutritional inducer(s), including, but not limited to, arabinose, IPTG, rhamnose, tetracycline, and/or other chemical and/or nutritional inducers described herein or known in the art. In some embodiments, strains may comprise one or more payload gene sequence(s) under the control of one or more FNR promoter(s), and one or more payload gene sequence(s) under the control of a one or more constitutive promoter(s) described herein and are induced through the employment of phasing or cycling or pulsing or spiking techniques. In some embodiments, strains may comprise one or more payload gene sequence(s) under the control of an FNR promoter and one or more payload gene sequence(s) under the control of a one or more thermoregulated promoter(s) described herein, and are induced through the employment of phasing or cycling or pulsing or spiking techniques.

[0407] Any of the strains described herein can be grown through the employment of phasing or cycling or pulsing or spiking techniques. In one embodiment, expression of one or more payload(s) is under the control of one or more promoter(s) regulated by chemical and/or nutritional inducers and is induced during cell growth, cell expansion, fermentation, recovery, purification, formulation, and/or manufacture under anaerobic and/or low oxygen conditions.

[0408] In one embodiment, expression of one or more payload(s), is under the control of one or more promoter(s) regulated by chemical and/or nutritional inducers and is driven from the same promoter in the form of a multicistronic message and which are induced through the employment of phasing or cycling or pulsing or spiking techniques. In one embodiment, expression of one or more payload(s), is under the control of one or more promoter(s) regulated by chemical and/or nutritional inducers and is driven from the same promoter as two or more separate messages and is grown through the employment of phasing or cycling or pulsing or spiking techniques. In one embodiment, expression of one or more payload(s), is under the control of one or more promoter(s) regulated by chemical and/or nutritional inducers and is driven from the one or more different promoters, all of which are induced through the employment of phasing or cycling or pulsing or spiking techniques.

[0409] In one embodiment, strains may comprise a combination of gene sequence(s), some of which are under control of a first inducible promoter and others which are under control of a second inducible promoter, both induced by chemical and/or nutritional inducers, through the employment of phasing or cycling or pulsing or spiking techniques. In one embodiment, strains may comprise a combination of gene sequence(s), some of which are under control of a first inducible promoter and others which are under control of a second inducible promoter, both induced by chemical and/or nutritional inducers through the employment of phasing or cycling or pulsing or spiking techniques. In some embodiments, the strains comprise gene sequence(s) under the control of a a third inducible promoter, e.g., an anaerobic/low oxygen promoter, e.g., FNR promoter. In one embodiment, strains may comprise a combination of gene sequence(s), some of which are under control of a first inducible promoter, e.g., a chemically induced promoter or a low oxygen promoter and others which are under control of a second inducible promoter, e.g., a temperature sensitive promoter. In one embodiment, strains may comprise a combination of gene sequence(s), some of which are under control of a first inducible promoter, e.g., a FNR promoter and others which are under control of a second inducible promoter, e.g., a temperature sensitive promoter. In one embodiment, strains may comprise a combination of gene sequence(s), some of which are under control of a first inducible promoter, e.g., a chemically induced and others which are under control of a second inducible promoter, e.g., a temperature sensitive promoter. In some embodiments, strains may comprise one or more payload gene sequence(s) under the control of an FNR promoter and one or more payload gene sequence(s) under the control of a one or more promoter(s) which are induced by a one or more chemical and/or nutritional inducer(s), including, but not limited to, by arabinose, IPTG, rhamnose, tetracycline, and/or other chemical and/or nutritional inducers described herein or known in the art. Additionally the strains may comprise a construct which is under thermoregulatory control. In some embodiments, the bacteria strains further comprise payload sequence(s) under the control of one or more constitutive promoter(s) active under low oxygen conditions. Any of the strains described in these embodiments may be induced through the employment of phasing or cycling or pulsing or spiking techniques.

### Aerobic Induction of the FNR Promoter

[0410] FNRS24Y is a mutated form of FNR which is more resistant to inactivation by oxygen, and therefore can activate FNR promoters under aerobic conditions (see e.g., Jervis AJ The 02 sensitivity of the transcription factor FNR is controlled by Ser24 modulating the kinetics of [4Fe-4S] to [2Fe-2S] conversion, Proc Natl Acad Sci USA. 2009 Mar. 24; 106(12):4659-64, the contents of which is herein incorporated by reference in its entirety). In some embodiments, an oxygen bypass system shown and described in figures and examples is used. In this oxygen bypass system, FNRS24Y is induced by addition of arabinose and then drives the expression of EGF by binding and activating the FNR promoter under aerobic conditions. Thus, strains can be grown, produced or manufactured efficiently under aerobic conditions, while being effectively pre-induced and pre-loaded, as the system takes advantage of the strong FNR promoter resulting in of high levels of expression of EGF. This system does not interfere with or compromise in vivo activation, since the mutated FNRS24Y is no longer expressed in the absence of arabinose, and wild type FNR then binds to the FNR promoter and drives expression of EGF.

[0411] In some embodiments, FNRS24Y is expressed during aerobic culture growth and induces EGF. In other embodiments described herein, a second payload expression can also be induced aerobically, e.g., by arabinose. In a non-limiting example, EGF and FNRS24Y can in some embodiments be induced simultaneously, e.g., from an arabinose inducible promoter. In some embodiments, FNRS24Y and EGF are transcribed as a bicistronic message whose expression is driven by an arabinose promoter. In some embodiments, FNRS24Y is knocked into the arabinose operon, allowing expression to be driven from the endogenous Para promoter.

[0412] In some embodiments, a LacI promoter and IPTG induction are used in this system (in lieu of Para and arabinose induction). In some embodiments, a rhamnose inducible promoter is used in this system. In some embodiments, a temperature sensitive promoter is used to drive expression of FNRS24Y.

### Secretion

[0413] In any of the embodiments described herein, in which the genetically engineered organism, e.g., engineered bacteria, produces a protein, polypeptide, or peptide, DNA, RNA, small molecule or other molecule intended to be secreted from the microorganism, the engineered microorganism may comprise a secretion mechanism and corresponding gene sequence(s) encoding the secretion system.

[0414] In some embodiments, the recombinant bacteria further comprise a native secretion mechanism or non-native secretion mechanism that is capable of secreting the EGF molecule from the bacterial cytoplasm in the extracellular environment. Many bacteria have evolved sophisticated secretion systems to transport substrates across the bacterial cell envelope. Substrates, such as small molecules, proteins, and DNA, may be released into the extracellular space or periplasm (such as the gut lumen or other space), injected into a target cell, or associated with the bacterial membrane.

[0415] In Gram-negative bacteria, secretion machineries may span one or both of the inner and outer membranes. In some embodiments, the recombinant bacteria further comprise a non-native double membrane-spanning secretion system. Double membrane-spanning secretion systems include, but are not limited to, the type I secretion system (TISS), the type II secretion system (T2SS), the type III secretion system (T3SS), the type IV secretion system (T4SS), the type VI secretion system (T6SS), and the resistance-nodulation-division (RND) family of multi-drug efflux pumps (Pugsley 1993; Gerlach et al., 2007; Collinson et al., 2015; Costa et al., 2015; Reeves et al., 2015; WO2014138324A1, incorporated herein by reference). Examples of such secretion systems are shown in figures and examples. Mycobacteria, which have a Gram-negative-like cell envelope, may also encode a type VII secretion system (T7SS) (Stanley et al., 2003). With the exception of the T2SS, double membrane-spanning secretions generally transport substrates from the bacterial cytoplasm directly into the extracellular space or into the target cell. In contrast, the T2SS and secretion systems that span only the outer membrane may use a two-step mechanism, wherein substrates are first translocated to the periplasm by inner membrane-spanning transporters, and then transferred to the outer membrane or secreted into the extracellular space. Outer membrane-spanning secretion systems include, but are not limited to, the type V secretion or autotransporter system or autosecreter system (T5SS), the curli secretion system, and the chaperone-usher pathway for pili assembly (Saier, 2006; Costa et al., 2015).

[0416] In some embodiments in which EGF is secreted or exported from the microorganism, the engineered microorganism comprises gene sequence(s) that includes a secretion tag. In some embodiments, the EGF protein includes a “secretion tag” of either RNA or peptide origin to direct the EGF protein to specific secretion systems. For example, a secretion tag for the Type I Hemolysin secretion system is encoded in the C-terminal 53 amino acids of the alpha hemolysin protein (HlyA).

[0417] In some embodiments, a Hemolysin-based Secretion System is used to secrete EGF. Type I Secretion systems offer the advantage of translocating their passenger peptide directly from the cytoplasm to the extracellular space, obviating the two-step process of other secretion types. The alpha-hemolysin (HlyA) of uropathogenic Escherichia coli uses HlyB, an ATP-binding cassette transporter; HlyD, a membrane fusion protein; and TolC, an outer membrane protein. The assembly of these three proteins forms a channel through both the inner and outer membranes. HlyB inserts into inner membrane to form a pore, HlyD aligns HlyB with TolC (outer membrane pore) thereby forming a channel through inner and outer membrane. Natively, this channel is used to secrete HlyA, however, to secrete EGF, the secretion signal-containing C-terminal portion of HlyA is fused to the C-terminal portion of an EGF peptide (star) to mediate secretion of this peptide. The C-terminal secretion tag can be removed by either an autocatalytic or protease-catalyzed e.g., OmpT cleavage thereby releasing the EGF protein into the extracellular milieu. In some embodiments one or more EGF proteins contain expressed as fusion protein with the 53 amino acids of the C termini of alpha-hemolysin (hlyA) of E. coli CFT073 (C terminal secretion tag).

[0418] In some embodiments, a Type V Autotransporter Secretion System is used to secrete EGF. The Type V Auto-secretion System utilizes an N-terminal Sec-dependent peptide tag (inner membrane) and C-terminal tag (outer-membrane). This system uses the Sec-system to get from the cytoplasm to the periplasm. The C-terminal tag then inserts into the outer membrane forming a pore through which the “passenger protein” threads through. Due to the simplicity of the machinery and capacity to handle relatively large protein fluxes, the Type V secretion system is attractive for the extracellular production of recombinant proteins. EGF can be fused to an N-terminal secretion signal, a linker, and the beta-domain of an autotransporter. The N-terminal, Sec-dependent signal sequence directs the protein to the SecA-YEG machinery which moves the protein across the inner membrane into the periplasm, followed by subsequent cleavage of the signal sequence. The Beta-domain is recruited to the Bam complex (‘Beta-barrel assembly machinery’) where the beta-domain is folded and inserted into the outer membrane as a beta-barrel structure. EGF is threaded through the hollow pore of the beta-barrel structure ahead of the linker sequence. Once across the outer membrane, the passenger is released from the membrane-embedded C-terminal tag by either an autocatalytic, intein-like mechanism (left side of Bam complex) or via a membrane-bound protease (black scissors; right side of Bam complex) (i.e., OmpT). For example, a membrane-associated peptidase to a complimentary protease cut site in the linker. Thus, in some embodiments, the secreted molecule, such as a heterologous protein or peptide comprises an N-terminal secretion signal, a linker, and beta-domain of an autotransporter so as to allow the molecule to be secreted from the bacteria.

[0419] The N-terminal tag is removed by the Sec system. Thus, in some embodiments, the secretion system is able to remove this tag before secreting EGF from the engineered bacteria. In the Type V auto-secretion-mediated secretion the N-terminal peptide secretion tag is removed upon translocation of the “passenger” peptide from the cytoplasm into the periplasmic compartment by the native Sec system. Further, once the auto-secretor is translocated across the outer membrane the C-terminal secretion tag can be removed by either an autocatalytic or protease-catalyzed e.g., OmpT cleavage thereby releasing the molecule(s) into the extracellular milieu.

[0420] In some embodiments, the recombinant bacteria comprise a type III or a type III-like secretion system (T3SS) from Shigella, Salmonella, E. coli, Bivrio, Burkholderia, Yersinia, Chlamydia, or Pseudomonas. The traditional T3SS is capable of transporting a protein from the bacterial cytoplasm to the host cytoplasm through a needle complex. In the Type III traditional secretion system, the basal body closely resembles the flagella, however, instead of a “tail”/whip, the traditional T3SS has a syringe to inject the passenger proteins into host cells. The secretion tag is encoded by an N-terminal peptide (lengths vary and there are several different tags, see PCT/US14/020972). The N-terminal tag is not removed from the polypeptides in this secretion system.

[0421] The T3SS may be modified to secrete the molecule from the bacterial cytoplasm, but not inject the molecule into the host cytoplasm. Thus, the molecule is secreted into the gut lumen, tumor microenvironment, or other extracellular space. In some embodiments, the recombinant bacteria comprise said modified T3SS and are capable of secreting the EGF from the bacterial cytoplasm. In some embodiments, the secreted molecule, such as a heterologous protein or peptide comprises a type III secretion sequence that EGF to be secreted from the bacteria.

[0422] In the Flagellar modified Type III Secretion, the tag is encoded in 5′ untranslated region of the mRNA and thus there is no peptide tag to cleave/remove. This modified system does not contain the “syringe” portion and instead uses the basal body of the flagella structure as the pore to translocate across both membranes and out through the forming flagella. If the fliC/fliD genes (encoding the flagella “tail”/whip) are disrupted the flagella cannot fully form and this promotes overall secretion. In some embodiments, the tail portion can be removed entirely.

[0423] In some embodiments, a flagellar type III secretion pathway is used to EGF. In some embodiments, an incomplete flagellum is used to secrete EGF by recombinantly fusing the peptide to an N-terminal flagellar secretion signal of a native flagellar component. In this manner, the intracellularly expressed chimeric peptide can be mobilized across the inner and outer membranes into the surrounding host environment.

[0424] For example, a modified flagellar type III secretion apparatus in which untranslated DNA fragment upstream of the gene fliC (encoding flagellin), e.g., a 173-bp region, is fused to the gene encoding the heterologous protein or peptide can be used to secrete polypeptides of interest (See, e.g., Majander et al., Extracellular secretion of polypeptides using a modified Escherichia coli flagellar secretion apparatus. Nat Biotechnol. 2005 April; 23(4):475-81). In some cases, the untranslated region from the fliC loci may not be sufficient to mediate translocation of the passenger peptide through the flagella. Here it may be necessary to extend the N-terminal signal into the amino acid coding sequence of FliC, for example, by using the 173 bp of untranslated region along with the first 20 amino acids of FliC (see, e.g., Duan et al., Secretion of Insulinotropic Proteins by Commensal Bacteria: Rewiring the Gut To Treat Diabetes, Appl. Environ. Microbiol. December 2008 vol. 74 no. 23 7437-7438).

[0425] In alternate embodiments, the recombinant bacteria further comprise a non-native single membrane-spanning secretion system. Single membrane-spanning transporters may act as a component of a secretion system, or may export substrates independently. Such transporters include, but are not limited to, ATP-binding cassette translocases, flagellum/virulence-related translocases, conjugation-related translocases, the general secretory system (e.g., the SecYEG complex in E. coli), the accessory secretory system in mycobacteria and several types of Gram-positive bacteria (e.g., Bacillus anthracis, Lactobacillus johnsonii, Corynebacterium glutamicum, Streptococcus gordonii, Staphylococcus aureus), and the twin-arginine translocation (TAT) system (Saier, 2006; Rigel and Braunstein, 2008; Albiniak et al., 2013). It is known that the general secretory and TAT systems can both export substrates with cleavable N-terminal signal peptides into the periplasm, and have been explored in the context of biopharmaceutical production. The TAT system may offer particular advantages, however, in that it is able to transport folded substrates, thus eliminating the potential for premature or incorrect folding. In certain embodiments, the recombinant bacteria comprise a TAT or a TAT-like system and are capable of secreting EGF from the bacterial cytoplasm. One of ordinary skill in the art would appreciate that the secretion systems disclosed herein may be modified to act in different species, strains, and subtypes of bacteria, and/or adapted to deliver different payloads.

[0426] In order to translocate EGF to the extracellular space, the polypeptide must first be translated intracellularly, mobilized across the inner membrane and finally mobilized across the outer membrane. EGF contains disulphide bonds to stabilize the tertiary and quaternary structures. While these bonds are capable of correctly forming in the oxidizing periplasmic compartment with the help of periplasmic chaperones, in order to translocate the polypeptide across the outer membrane the disulphide bonds must be reduced and the protein unfolded again.

[0427] One way to secrete properly folded proteins in gram-negative bacteria—particularly those requiring disulphide bonds—is to target the reducing-environment periplasm in conjunction with a destabilizing outer membrane. In this manner the protein is mobilized into the oxidizing environment and allowed to fold properly. In contrast to orchestrated extracellular secretion systems, the protein is then able to escape the periplasmic space in a correctly folded form by membrane leakage. These “leaky” gram-negative mutants are therefore capable of secreting bioactive, properly disulphide-bonded polypeptides. In some embodiments, the recombinant bacteria have a “leaky” or de-stabilized outer membrane. Destabilizing the bacterial outer membrane to induce leakiness can be accomplished by deleting or mutagenizing genes responsible for tethering the outer membrane to the rigid peptidoglycan skeleton, including for example, lpp, ompC, ompA, ompF, tolA, tolB, pal, degS, degP, and nlpl. Lpp is the most abundant polypeptide in the bacterial cell existing at ˜500,000 copies per cell and functions as the primary ‘staple’ of the bacterial cell wall to the peptidoglycan. Silhavy, T. J., Kahne, D. & Walker, S. The bacterial cell envelope. Cold Spring Harb Perspect Biol 2, a000414 (2010). TolA-pal and OmpA complexes function similarly to Lpp and are other deletion targets to generate a leaky phenotype. Additionally, leaky phenotypes have been observed when periplasmic proteases are inactivated. The periplasm is very densely packed with protein and therefore encode several periplasmic proteins to facilitate protein turnover. Removal of periplasmic proteases such as degS, degP or nlpI can induce leaky phenotypes by promoting an excessive build-up of periplasmic protein. Mutation of the proteases can also preserve the EGF polypeptide by preventing targeted degradation by these proteases. Moreover, a combination of these mutations may synergistically enhance the leaky phenotype of the cell without major sacrifices in cell viability. Thus, in some embodiments, the engineered bacteria have one or more deleted or mutated membrane genes. In some embodiments, the engineered bacteria have a deleted or mutated lpp gene. In some embodiments, the engineered bacteria have one or more deleted or mutated gene(s), selected from ompA, ompA, and ompF genes. In some embodiments, the engineered bacteria have one or more deleted or mutated gene(s), selected from tolA, tolB, and pal genes. in some embodiments, the engineered bacteria have one or more deleted or mutated periplasmic protease genes. In some embodiments, the engineered bacteria have one or more deleted or mutated periplasmic protease genes selected from degS, degP, and nlpl. In some embodiments, the engineered bacteria have one or more deleted or mutated gene(s), selected from lpp, ompA, ompF, tolA, tolB, pal, degS, degP, and nlpl genes.

[0428] To minimize disturbances to cell viability, the leaky phenotype can be made inducible by placing one or more membrane or periplasmic protease genes, e.g., selected from lpp, ompA, ompF, tolA, tolB, pal, degS, degP, and nlpl, under the control of an inducible promoter. For example, expression of lpp or other cell wall stability protein or periplasmic protease can be repressed in conditions where EGF needs to be delivered (secreted). For instance, under inducing conditions a transcriptional repressor protein or a designed antisense RNA can be expressed which reduces transcription or translation of a target membrane or periplasmic protease gene. Conversely, overexpression of certain peptides can result in a destabilized phenotype, e.g., overexpression of colicins or the third topological domain of TolA, wherein peptide overexpression can be induced in conditions in which EGF needs to be delivered (secreted). These sorts of strategies would decouple the fragile, leaky phenotypes from biomass production. Thus, in some embodiments, the engineered bacteria have one or more membrane and/or periplasmic protease genes under the control of an inducible promoter.

[0429] Table 9 and Table 10 below lists secretion systems for Gram-positive bacteria and Gram-negative bacteria.

TABLE 9
Secretion systems for gram positive bacteria

| Bacterial Strain | Relevant Secretion System |
|---|---|
| C. novyi-NT (Gram+) | Sec pathway |
| | Twin- arginine (TAT) pathway |
| C. butryicum (Gram+) | Sec pathway |
| | Twin- arginine (TAT) pathway |
| Listeria monocytogenes (Gram+) | Sec pathway |
| | Twin- arginine (TAT) pathway |

TABLE 10
Secretion Systems for Gram negative bacteria
Protein secretary pathways (SP) in gram-negative bacteria and descendants

| | | | | | | | |
|---|---|---|---|---|---|---|---|
| Type | | | | | | # Proteins/ | Energy |
| (Abbreviation) | Name | TC#² | Bacteria | Archaea | Eukarya | System | Source |

IMPS - Gram-negative bacterial inner membrane channel-forming translocases

| | | | | | | | |
|---|---|---|---|---|---|---|---|
| ABC (SIP) | ATP binding | 3.A.1 | + | + | + | 3-4 | ATP |
| | cassette translocase | | | | | | |
| SEC (IISP) | General secretory | 3.A.5 | + | + | + | ~12 | GTP |
| | translocase | | | | | | OR |
| | | | | | | | ATP + |
| | | | | | | | PMF |
| Fla/Path | Flagellum/virulence- | 3.A.6 | + | − | − | >10 | ATP |
| (IIISP) | related translocase | | | | | | |
| Conj (IVSP) | Conjugation-related | 3.A.7 | + | − | − | >10 | ATP |
| | translocase | | | | | | |
| Tat (IISP) | Twin-arginine | 2.A.64 | + | + | + | 2-4 | PMF |
| | targeting translocase | | | | (chloroplasts) | | |
| Oxal (YidC) | Cytochrome oxidase | 2.A.9 | + | + | + | 1 | None or |
| | biogenesis family | | | | (mitochondria | | PMF |
| | | | | | chloroplasts) | | |
| MscL | Large conductance | 1.A.22 | + | + | + | 1 | None |
| | mechanosensitive | | | | | | |
| | channel family | | | | | | |
| Holins | Holin functional | 1.E.1•21 | + | − | − | 1 | None |
| | superfamily | | | | | | |

Eukaryotic Organelles

| | | | | | | | |
|---|---|---|---|---|---|---|---|
| MPT | Mitochondrial | 3.A.B | − | − | + | >20 | ATP |
| | protein translocase | | | | (mitochondrial) | | |
| CEPT | Chloroplast | 3.A.9 | (+) | − | + | ≥3 | GTP |
| | envelope protein | | | | (chloroplasts) | | |
| | translocase | | | | | | |
| Bcl-2 | Eukaryotic Bcl-2 | 1.A.21 | − | − | + | 1? | None |
| | family (programmed | | | | | | |
| | cell death) | | | | | | |

Gram-negative bacterial outer membrane channel-forming translocases

| | | | | | | | |
|---|---|---|---|---|---|---|---|
| MTB (IISP) | Main terminal | 3.A.15 | +^{b} | − | − | ~14 | ATP; |
| | branch of the | | | | | | PMF |
| | general secretory | | | | | | |
| | translocase | | | | | | |
| FUP AT-1 | Fimbrial usher | 1.B.11 | +^{b} | − | − | 1 | None |
| | protein | 1.B.12 | +^{b} | | − | 1 | None |
| | Autotransporter-1 | | | | | | |
| AT-2 OMF | Autotransporter-2 | 1.B.40 | +^{b} | − | − | 1 | None |
| (ISP) | | 1.B.17 | +^{b} | | +(?) | 1 | None |
| TPS Secretin | | 1.B.20 | + | − | + | 1 | None |
| (IISP and | | 1.B.22 | +^{b} | | − | 1 | None |
| IISP) | | | | | | | |
| OmpIP | Outer membrane | 1.B.33 | + | − | + | ≥4 | None |
| | insertion porin | | | | (mitochondria; | | |
| | | | | | chloroplasts) | | |

[0430] The above tables for Gram-positive and Gram-negative bacteria list secretion systems that can be used to secrete polypeptides and other molecules from the engineered bacteria (Milton H. Saier, Jr. Microbe/Volume 1, Number 9, 2006 “Protein Secretion Systems in Gram-Negative Bacteria Gram-negative bacteria possess many protein secretion-membrane insertion systems that apparently evolved independently”, the contents of which is herein incorporated by reference in its entirety).

[0431] In some embodiments, the recombinant bacterial comprise a native or non-native secretion system described herein for the secretion of a molecule, e.g., a cytokine, antibody (e.g., scFv), metabolic enzyme, e.g., kynureninase, an others described herein.

[0432] Polypeptide Sequences of exemplary secretion tags include PhoA (SEQ ID NO: 385), PhoA (SEQ ID NO: 386), OmpF (SEQ ID NO: 387), cvaC (SEQ ID NO: 388), TorA (SEQ ID NO: 389), fdnG (SEQ ID NO: 390), dmsA (SEQ ID NO: 391), PelB (SEQ ID NO: 392), HlyA secretion signal (SEQ ID NO: 393), and HlyA secretion signal (SEQ ID NO: 394). In some embodiments, secretion tags of endogenous secreted proteins from E. coli can be used to secrete EGF. Exemplary secretion tags from secreted E coli Nissle include ECOLIN_05715 Secretion signal (SEQ ID NO: 395), ECOLIN_16495 Secretion signal (SEQ ID NO: 396), ECOLIN_19410 Secretion signal (SEQ ID NO:397), and ECOLIN_19880 Secretion signal (SEQ ID NO:398). Additional secretion tags include adhesion (SEQ ID NOS: 1091 and 1099), DsbA (SEQ ID NOS: 1092 and 1100), GltI (SEQ ID NOS: 1093 and 1101), GspD (SEQ ID NOS: 1089 and 1102), HdeB (SEQ ID NOS: 1090 and 1103), MalE (SEQ ID NOS: 1094 and 1104), OppA (SEQ ID NOS: 1095 and 1105), PelB (SEQ ID NOS: 1096 and 1106), PhoA (SEQ ID NOS: 1097 and 1107) and PpiA (SEQ ID NOS: 1098 and 1108).

[0433] In some embodiments, recombinant bacteria comprise a nucleic acid sequence that encodes a polypeptide which is at least about 80%, 85%, 90%, 95%, or 99% homologous to one or more of the sequences of SEQ ID NOS: 385-398 and 1089-1108, or a nucleic acid sequence which is at least about 80%, 85%, 90%, 95%, or 99% homologous to one or more of the sequences of SEQ ID NOS: 385-398 and 1089-1108. Any secretion tag or secretion system can be combined with any cytokine described herein, and can be used to generate a construct (plasmid based or integrated) which is driven by a directly or indirectly inducible or constitutive promoter described herein. In some embodiments, the secretion system is used in combination with one or more genomic mutations, which leads to the leaky or diffusible outer membrane phenotype (DOM), including but not limited to, lpp, nlP, tolA, pal.

[0434] In some embodiments, the secretion system is selected from the type I (e.g., hemolysin secretion system), type II, type III, type III flagellar, type IV, type V, type VI, type VII, type VIII secretion systems and modifications thereof, e.g., modified type III, modified type III flagellar secretion systems, resistance-nodulation-division (RND) multi-drug efflux pumps, a single membrane secretion system, Sec and, TAT secretion systems.

[0435] Any of the secretion systems described herein may according to the disclosure be employed to secrete EGF. In some embodiments, EGF secreted by the recombinant bacteria is modified to increase resistance to proteases, e.g., intestinal proteases.

[0436] In some embodiments, the genetically engineered microorganisms are capable of expressing any one or more of the described circuits in low-oxygen conditions, and/or in the gut, or tissue specific molecules or metabolites, and/or in the presence of molecules or metabolites associated with inflammation or immune suppression, and/or in the presence of metabolites that may be present in the gut, and/or in the presence of metabolites that may or may not be present in vivo, and may be present in vitro during strain culture, expansion, production and/or manufacture, such as arabinose and others described herein. In some embodiments, the gene sequences(s) are controlled by a promoter inducible by such conditions and/or inducers. In some embodiments, the gene sequences(s) are controlled by a constitutive promoter, as described herein. In some embodiments, the gene sequences(s) are controlled by a constitutive promoter, and are expressed in in vivo conditions and/or in vitro conditions, e.g., during expansion, production and/or manufacture, as described herein.

[0437] In some embodiments, any one or more of the described circuits are present on one or more plasmids (e.g., high copy or low copy) or are integrated into one or more sites in the microorganism's chromosome. Also, in some embodiments, the genetically engineered microorganisms are further capable of expressing any one or more of the described circuits and further comprise one or more of the following: (1) one or more auxotrophies, such as any auxotrophies known in the art and provided herein, e.g., thyA auxotrophy, (2) one or more kill switch circuits, such as any of the kill-switches described herein or otherwise known in the art, (3) one or more antibiotic resistance circuits, (4) one or more transporters for importing biological molecules or substrates, such any of the transporters described herein or otherwise known in the art, (5) one or more secretion circuits, such as any of the secretion circuits described herein and otherwise known in the art, (6) one or more surface display circuits, such as any of the surface display circuits described herein and otherwise known in the art and (7) one or more circuits for the production or degradation of one or more metabolites described herein (8) combinations of one or more of such additional circuits.

[0438] Non-limiting examples of EGF are described herein. These polypeptides may be mutated to increase stability, resistance to protease digestion, and/or activity.

TABLE 11
Comparison of Secretion systems for secretion of polypeptide from engineered
bacteria

| Secretion | | | | |
|---|---|---|---|---|
| System | Tag | Cleavage | Advantages | Other features |
| Modified Type | mRNA (or | No cleavage | No peptide | May not be as suited for |
| III (flagellar) | N-terminal) | necessary | tag | larger proteins |
| | | | Endogenous | Deletion of flagellar genes |
| Type V | N- and C- | Yes | Large proteins | 2-step secretion |
| autotransport | terminal | | Endogenous | |
| | | | Cleavable | |
| Type I | C-terminal | No | | Tag; Exogenous Machinery |
| Diffusible Outer | N-terminal | Yes | Disulfide bond | May affect cell |
| Membrane | | | formation | fragility/survivability/ |
| (DOM) | | | | growth/yield |

[0439] In some embodiments, EGF secreted using components of the flagellar type III secretion system. In a non-limiting example, EGF is secreted via Type I Hemolysin Secretion, is assembled behind a fliC-5′UTR (e.g., 173-bp untranslated region from the fliC loci), and is driven by the native promoter. In other embodiments, the expression of EGF secreted using components of the flagellar type III secretion system is driven by a tet-inducible promoter. In alternate embodiments, an inducible promoter such as oxygen level-dependent promoters (e.g., FNR-inducible promoter), promoters induced by IBD specific molecules or promoters induced by inflammation or an inflammatory response (RNS, ROS promoters), and promoters induced by a metabolite that may or may not be naturally present (e.g., can be exogenously added) in the gut, e.g., arabinose is used. In some embodiments, EGF is expressed from a plasmid (e.g., a medium copy plasmid). In some embodiments, EGF is expressed from a construct which is integrated into fliC locus (thereby deleting fliC), where it is driven by the native FliC promoter. In some embodiments, an N terminal part of FliC (e.g., the first 20 amino acids of FliC) is included in the construct, to further increase secretion efficiency.

[0440] In some embodiments, EGF is secreted via Type I Hemolysin Secretion, are secreted using via a diffusible outer membrane (DOM) system. In some embodiments, EGF is fused to a N-terminal Sec-dependent secretion signal. Non-limiting examples of such N-terminal Sec-dependent secretion signals include PhoA, OmpF, OmpA, and cvaC. In alternate embodiments, EGF is fused to a Tat-dependent secretion signal. Exemplary Tat-dependent tags include TorA, FdnG, and DmsA.

[0441] In certain embodiments, the recombinant bacteria comprise deletions or mutations in one or more of the outer membrane and/or periplasmic proteins. Non-limiting examples of such proteins, one or more of which may be deleted or mutated, include lpp, pal, tolA, and/or nlpI. In some embodiments, lpp is deleted or mutated. In some embodiments, pal is deleted or mutated. In some embodiments, tolA is deleted or mutated. In other embodiments, nlpI is deleted or mutated. In yet other embodiments, certain periplasmic proteases are deleted or mutated, e.g., to increase stability of the polypeptide in the periplasm. Non-limiting examples of such proteases include degP and ompT. In some embodiments, degP is deleted or mutated. In some embodiments, ompT is deleted or mutated. In some embodiments, degP and ompT are deleted or mutated.

[0442] In some embodiments, EGF is secreted via Type I Hemolysin Secretion, are secreted via a Type V Auto-secreter (pic Protein) Secretion. In some embodiments, EGF is expressed as a fusion protein with the native Nissle auto-secreter E. coli_01635 (where the original passenger protein is replaced by EGF.

[0443] In some embodiments, EGF is secreted via Type I Hemolysin Secretion, are secreted via Type I Hemolysin Secretion. In one embodiment, EGF is expressed as fusion protein with the 53 amino acids of the C terminus of alpha-hemolysin (hlyA) of E. coli CFT073.

### Essential Genes and Auxotrophs

[0444] As used herein, the term “essential gene” refers to a gene which is necessary to for cell growth and/or survival. Bacterial essential genes are well known to one of ordinary skill in the art, and can be identified by directed deletion of genes and/or random mutagenesis and screening (see, e.g., Zhang, 2009, Nucl. Acids Res., 37:D455-D458 and Gerdes et al., Curr. Opin. Biotechnol., 17(5):448-456, the entire contents of each reference are incorporated herein by reference).

[0445] An “essential gene” may be dependent on the circumstances and environment in which an organism lives. For example, a mutation of, modification of, or excision of an essential gene may result in the recombinant bacteria of the disclosure becoming an auxotroph. An auxotrophic modification is intended to cause bacteria to die in the absence of an exogenously added nutrient essential for survival or growth because they lack the gene(s) necessary to produce that essential nutrient.

[0446] An auxotrophic modification is intended to cause bacteria to die in the absence of an exogenously added nutrient essential for survival or growth because they lack the gene(s) necessary to produce that essential nutrient. In some embodiments, any of the recombinant bacteria described herein also comprise a deletion or mutation in a gene required for cell survival and/or growth. In one embodiment, the essential gene is a DNA synthesis gene, for example, thyA. In another embodiment, the essential gene is a cell wall synthesis gene, for example, dapA. In yet another embodiment, the essential gene is an amino acid gene, for example, serA or MetA. Any gene required for cell survival and/or growth may be targeted, including but not limited to, cysE, glnA, ilvD, leuB, lysA, serA, metA, glyA, hisB, ilvA, pheA, proA, thrC, trpC, tyrA, thyA, uraA, dapA, dapB, dapD, dapE, dapF, flhD, metB, metC, proAB, and thil, as long as the corresponding wild-type gene product is not produced in the bacteria.

[0447] Table 15 lists exemplary bacterial genes which may be disrupted or deleted to produce an auxotrophic strain. These include, but are not limited to, genes required for oligonucleotide synthesis, amino acid synthesis, and cell wall synthesis.

TABLE 15
Non-limiting Examples of Bacterial Genes
Useful for Generation of an Auxotroph

| Amino Acid | Oligonucleotide | Cell Wall |
|---|---|---|
| cysE | thy A | dapA |
| glnA | uraA | dapB |
| ilvD | | dapD |
| leuB | | dapE |
| lysA | | dapF |
| ser A | | |
| metA | | |
| gly A | | |
| hisB | | |
| ilyA | | |
| pheA | | |
| proA | | |
| thrC | | |
| trpC | | |
| tyrA | | |

[0448] Table 16 shows the survival of various amino acid auxotrophs in the mouse gut, as detected 24 hrs and 48 hrs post-gavage. These auxotrophs were generated using BW25113, a non-Nissle strain of E. coli.

TABLE 16
Survival of amino acid auxotrophs in the mouse gut

| Gene | AA Auxotroph | Pre-Gavage | 24 hours | 48 hours |
|---|---|---|---|---|
| argA | Arginine | Present | Present | Absent |
| cysE | Cysteine | Present | Present | Absent |
| glnA | Glutamine | Present | Present | Absent |
| glyA | Glycine | Present | Present | Absent |
| hisB | Histidine | Present | Present | Present |
| ilvA | Isoleucine | Present | Present | Absent |
| leuB | Leucine | Present | Present | Absent |
| lysA | Lysine | Present | Present | Absent |
| metA | Methionine | Present | Present | Present |
| pheA | Phenylalanine | Present | Present | Present |
| proA | Proline | Present | Present | Absent |
| serA | Serine | Present | Present | Present |
| thrC | Threonine | Present | Present | Present |
| trpC | Tryptophan | Present | Present | Present |
| tyrA | Tyrosine | Present | Present | Present |
| ilvD | Valine/Isoleucine/ | Present | Present | Absent |
| | Leucine | | | |
| thyA | Thiamine | Present | Absent | Absent |
| uraA | Uracil | Present | Absent | Absent |
| flhD | FlhD | Present | Present | Present |

[0449] For example, thymine is a nucleic acid that is required for bacterial cell growth; in its absence, bacteria undergo cell death. The thyA gene encodes thimidylate synthetase, an enzyme that catalyzes the first step in thymine synthesis by converting dUMP to dTMP (Sat et al., 2003). In some embodiments, the bacterial cell of the disclosure is a thyA auxotroph in which the thyA gene is deleted and/or replaced with an unrelated gene. A thyA auxotroph can grow only when sufficient amounts of thymine are present, e.g., by adding thymine to growth media in vitro, or in the presence of high thymine levels found naturally in the human gut in vivo. In some embodiments, the bacterial cell of the disclosure is auxotrophic in a gene that is complemented when the bacterium is present in the mammalian gut. Without sufficient amounts of thymine, the thyA auxotroph dies. In some embodiments, the auxotrophic modification is used to ensure that the bacterial cell does not survive in the absence of the auxotrophic gene product (e.g., outside of the gut).

[0450] Diaminopimelic acid (DAP) is an amino acid synthetized within the lysine biosynthetic pathway and is required for bacterial cell wall growth (Meadow et al., 1959; Clarkson et al., 1971). In some embodiments, any of the recombinant bacteria described herein is a dapD auxotroph in which dapD is deleted and/or replaced with an unrelated gene. A dapD auxotroph can grow only when sufficient amounts of DAP are present, e.g., by adding DAP to growth media in vitro. Without sufficient amounts of DAP, the dapD auxotroph dies. In some embodiments, the auxotrophic modification is used to ensure that the bacterial cell does not survive in the absence of the auxotrophic gene product (e.g., outside of the gut).

[0451] In other embodiments, the recombinant bacterium of the present disclosure is a uraA auxotroph in which uraA is deleted and/or replaced with an unrelated gene. The uraA gene codes for UraA, a membrane-bound transporter that facilitates the uptake and subsequent metabolism of the pyrimidine uracil (Andersen et al., 1995). A uraA auxotroph can grow only when sufficient amounts of uracil are present, e.g., by adding uracil to growth media in vitro. Without sufficient amounts of uracil, the uraA auxotroph dies. In some embodiments, auxotrophic modifications are used to ensure that the bacteria do not survive in the absence of the auxotrophic gene product (e.g., outside of the gut).

[0452] In complex communities, it is possible for bacteria to share DNA. In very rare circumstances, an auxotrophic bacterial strain may receive DNA from a non-auxotrophic strain, which repairs the genomic deletion and permanently rescues the auxotroph. Therefore, engineering a bacterial strain with more than one auxotroph may greatly decrease the probability that DNA transfer will occur enough times to rescue the auxotrophy. In some embodiments, the recombinant bacteria comprise a deletion or mutation in two or more genes required for cell survival and/or growth.

[0453] Other examples of essential genes include, but are not limited to yhbV, yagG, hemB, secD, secF, ribD, ribE, thiL, dxs, ispA, dnaX, adk, hemH, lpxH, cysS, fold, rplT, infC, thrS, nadE, gapA, yeaZ, aspS, argS, pgsA, yefM, metG, folE, yejM, gyrA, nrdA, nrdB, folC, accD, fabB, gltX, ligA, zipA, dapE, dapA, der, hisS, ispG, suhB, tadA, acpS, era, me, ftsB, eno, pyrG, chpR, lgt, fbaA, pgk, yqgD, metK, yqgF, plsC, ygiT, pare, ribB, cca, ygjD, tdcF, yraL, yihA, ftsN, murI, murB, birA, secE, nusG, rplJ, rplL, rpoB, rpoC, ubiA, plsB, lexA, dnaB, ssb, alsK, groS, psd, orn, yjeE, rpsR, chpS, ppa, valS, yjgP, yjgQ, dnaC, ribF, ispA, ispH, dapB, folA, imp, yabQ, ftsL, ftsI, murE, murF, mraY, murD, ftsW, murG, murC, ftsQ, ftsA, ftsZ, lpxC, secM, secA, can, folK, hemL, yadR, dapD, map, rpsB, infB, nusA, ftsH, obgE, rpmA, rplU, ispB, murA, yrbB, yrbK, yhbN, rpsI, rplM, degS, mreD, mreC, mreB, accB, accC, yrdC, def, fmt, rplQ, rpoA, rpsD, rpsK, rpsM, entD, mrdB, mrdA, nadD, hlepB, rpoE, pssA, yfiO, rplS, trmD, rpsP, ffh, grpE, yfjB, csrA, ispF, ispD, rplW, rplD, rplC, rpsJ, fusA, rpsG, rpsL, trpS, yrfF, asd, rpoH, ftsX, ftsE, ftsY, frr, dxr, ispU, rfaK, kdtA, coaD, rpmB, dfp, dut, gmk, spot, gyrB, dnaN, dnaA, rpmH, rnpA, yidC, tnaB, gimS, glmU, wzyE, hemD, hemC, yigP, ubiB, ubiD, hemG, secY, rplO, rpmD, rpsE, rplR, rplF, rpsH, rpsN, rplE, rplX, rplN, rpsQ, rpmC, rplP, rpsC, rplV, rpsS, rplB, cdsA, yaeL, yaeT, lpxD, fabZ, lpxA, lpxB, dnaE, accA, tilS, proS, yafF, tsf, pyrH, olA, rlpB, leuS, int, ginS, fidA, cydA, infA, cydC, ftsK, lolA, serS, rpsA, msbA, lpxK, kdsB, mukF, mukE, mukB, asnS, fabA, mviN, rne, yceQ, fabD, fabG, acpP, tmk, holB, lolC, lolD, lolE, purB, ymfK, minE, mind, pth, rsA, ispE, lolB, hemA, prfA, prmC, kdsA, topA, ribA, fabI, racR, dicA, ydfB, tyrS, ribC, ydiL, pheT, pheS, yhhQ, bcsB, glyQ, yibJ, and gpsA. Other essential genes are known to those of ordinary skill in the art.

[0454] In some embodiments, the recombinant bacterium of the present disclosure is a synthetic ligand-dependent essential gene (SLiDE) bacterial cell. SLiDE bacterial cells are synthetic auxotrophs with a mutation in one or more essential genes that only grow in the presence of a particular ligand (see Lopez and Anderson, ACS Synthetic Biology (2015), the entire contents of which are expressly incorporated herein by reference).

[0455] In some embodiments, the SLiDE bacterial cell comprises a mutation in an essential gene. In some embodiments, the essential gene is selected from the group consisting of pheS, dnaN, tyrS, metG, and adk. In some embodiments, the essential gene is dnaN comprising one or more of the following mutations: H191N, R240C, I317S, F319V, L340T, V347I, and S345C. In some embodiments, the essential gene is dnaN comprising the mutations H191N, R240C, I317S, F319V, L340T, V347I, and S345C. In some embodiments, the essential gene is pheS comprising one or more of the following mutations: F125G, P183T, P184A, R186A, and I188L. In some embodiments, the essential gene is pheS comprising the mutations F125G, P183T, P184A, R186A, and I188L. In some embodiments, the essential gene is tyrS comprising one or more of the following mutations: L36V, C38A and F40G. In some embodiments, the essential gene is tyrS comprising the mutations L36V, C38A and F40G. In some embodiments, the essential gene is metG comprising one or more of the following mutations: E45Q, N47R, I49G, and A51C. In some embodiments, the essential gene is metG comprising the mutations E45Q, N47R, I49G, and A51C. In some embodiments, the essential gene is adk comprising one or more of the following mutations: I4L, L5I and L6G. In some embodiments, the essential gene is adk comprising the mutations I4L, L5I and L6G.

[0456] In some embodiments, the recombinant bacterium is complemented by a ligand. In some embodiments, the ligand is selected from the group consisting of benzothiazole, indole, 2-aminobenzothiazole, indole-3-butyric acid, indole-3-acetic acid, and L-histidine methyl ester. For example, bacterial cells comprising mutations in metG (E45Q, N47R, I49G, and A51C) are complemented by benzothiazole, indole, 2-aminobenzothiazole, indole-3-butyric acid, indole-3-acetic acid or L-histidine methyl ester. Bacterial cells comprising mutations in dnaN (H191N, R240C, I317S, F319V, L340T, V347I, and S345C) are complemented by benzothiazole, indole or 2-aminobenzothiazole. Bacterial cells comprising mutations in pheS (F125G, P183T, P184A, R186A, and I188L) are complemented by benzothiazole or 2-aminobenzothiazole. Bacterial cells comprising mutations in tyrS (L36V, C38A, and F40G) are complemented by benzothiazole or 2-aminobenzothiazole. Bacterial cells comprising mutations in adk (I4L, L5I and L6G) are complemented by benzothiazole or indole.

[0457] In some embodiments, the recombinant bacterium comprises more than one mutant essential gene that renders it auxotrophic to a ligand. In some embodiments, the bacterial cell comprises mutations in two essential genes. For example, in some embodiments, the bacterial cell comprises mutations in tyrS (L36V, C38A, and F40G) and metG (E45Q, N47R, I49G, and A51C). In other embodiments, the bacterial cell comprises mutations in three essential genes. For example, in some embodiments, the bacterial cell comprises mutations in tyrS (L36V, C38A, and F40G), metG (E45Q, N47R, I49G, and A51C), and pheS (F125G, P183T, P184A, R186A, and I188L).

[0458] In some embodiments, the recombinant bacterium is a conditional auxotroph, wherein the expression of a heterologous gene is activated by an exogenous environmental signal. In some embodiments, the recombinant bacterium is a conditional auxotroph whose essential gene(s) is replaced using an arabinose system. In the absence of arabinose, the AraC transcription factor adopts a conformation that represses transcription of the essential gene under the control of the araBAD promoter and the bacterial cell cannot survive. In the presence of arabinose, the AraC transcription factor undergoes a conformational change that allows it to bind to and activate the araBAD promoter, which induces expression of the essential gene and maintains viability of the bacterial cell.

[0459] In some embodiments, the recombinant bacterium of the disclosure is an auxotroph and also comprises kill-switch circuitry, such as any of the kill-switch components and systems described herein. For example, the recombinant bacteria may comprise a deletion or mutation in an essential gene required for cell survival and/or growth, for example, in a DNA synthesis gene, for example, thyA, cell wall synthesis gene, for example, dapA and/or an amino acid gene, for example, serA or MetA and may also comprise a toxin gene that is regulated by one or more transcriptional activators that are expressed in response to an environmental condition(s) and/or signal(s) (such as the described arabinose system) or regulated by one or more recombinases that are expressed upon sensing an exogenous environmental condition(s) and/or signal(s) (such as the recombinase systems described herein). Other embodiments are described in Wright et al., ACS Synthetic Biology (2015) 4: 307-16, the entire contents of which are expressly incorporated herein by reference. In some embodiments, the recombinant bacterium of the disclosure is an auxotroph and also comprises kill-switch circuitry, such as any of the kill-switch components and systems described herein, as well as another biosecurity system, such a conditional origin of replication (Wright et al., 2015). In other embodiments, auxotrophic modifications may also be used to screen for mutant bacteria that produce the EGF molecule.

### Antibiotic Resistance

[0460] In some embodiments, the recombinant bacteria comprise one or more genes providing resistance to antibiotics. As used herein, “Antibiotics” are substances that kill bacteria (bactericidal), or inhibit bacterial growth (bacteriostatic). Antibiotics may be natural products, many common antibiotics used in labs today are semi-synthetic or fully synthetic compounds. An antibiotic resistance gene can be added to a bacterium of interest, either on a plasmid or integrated into the chromosome in conjunction with the EGF gene, allowing the simple detection of bacteria containing the EGF gene by growing the bacteria on selective media containing the antibiotic.

[0461] In some embodiments, the recombinant bacteria comprise one or more genes providing resistance to aminoglycosides. In some embodiments, the recombinant bacteria comprise one or more genes providing resistance to a beta-lactam. In some embodiments, the recombinant bacteria comprise one or more genes providing resistance to glycopeptides. In some embodiments, the recombinant bacteria comprise one or more genes providing resistance to macrolides. In some embodiments, the recombinant bacteria comprise one or more genes providing resistance to polypeptide antibiotics. In some embodiments, the recombinant bacteria comprise one or more genes providing resistance to a tetracycline.

[0462] In some embodiments, the recombinant bacteria comprise one or more genes providing resistance to Kanamycin. In some embodiments, the recombinant bacteria comprise one or more genes providing resistance to Spectinomycin. In some embodiments, the recombinant bacteria comprise one or more genes providing resistance to Streptomycin. In some embodiments, the recombinant bacteria comprise one or more genes providing resistance to Ampicillin. In some embodiments, the recombinant bacteria comprise one or more genes providing resistance to Carbenicillin. In some embodiments, the recombinant bacteria comprise one or more genes providing resistance to Bleomycin. In some embodiments, the recombinant bacteria comprise one or more genes providing resistance to Erythromycin. In some embodiments, the recombinant bacteria comprise one or more genes providing resistance to Polymyxin B. In some embodiments, the recombinant bacteria comprise one or more genes providing resistance to Tetracycline. In some embodiments, the recombinant bacteria comprise one or more genes providing resistance to Chloramphenicol.

### Methods of Screening

### Mutagenesis

[0463] In some embodiments, the inducible promoter is operably linked to a detectable product, e.g., GFP, and can be used to screen for mutants. In some embodiments, the inducible promoter is mutagenized, and mutants are selected based upon the level of detectable product, e.g., by flow cytometry, fluorescence-activated cell sorting (FACS) when the detectable product fluoresces. In some embodiments, one or more transcription factor binding sites is mutagenized to increase or decrease binding. In alternate embodiments, the wild-type binding sites are left intact, and the remainder of the regulatory region is subjected to mutagenesis. In some embodiments, the mutant promoter is inserted into the recombinant bacteria to increase expression of the EGF molecule under inducing conditions, as compared to unmutated bacteria of the same subtype under the same conditions. In some embodiments, the inducible promoter and/or corresponding transcription factor is a synthetic, non-naturally occurring sequence.

[0464] In some embodiments, the gene encoding EGF is mutated to increase expression and/or stability of said molecule under inducing conditions, as compared to unmutated bacteria of the same subtype under the same conditions. In some embodiments, one or more of the genes in a gene cassette for producing EGF is mutated to increase expression of said molecule under inducing conditions, as compared to unmutated bacteria of the same subtype under the same conditions. In some embodiments, the efficacy or activity of any of the importers and exporters for metabolites of interest can be improved through mutations in any of these genes. Mutations increase uptake or export of such metabolites, including but not limited to, tryptophan, e.g., under inducing conditions, as compared to unmutated bacteria of the same subtype under the same conditions. Methods for directed mutation and screening are known in the art.

### Pharmaceutical Compositions and Formulations

[0465] Pharmaceutical compositions comprising one or more recombinant bacteria, alone or in combination with prophylactic agents, therapeutic agents, and/or pharmaceutically acceptable carriers are provided.

[0466] In certain embodiments, the pharmaceutical composition comprises one species, strain, or subtype of bacteria that are engineered to comprise the genetic modifications described herein, e.g., to produce EGF. In alternate embodiments, the pharmaceutical composition comprises two or more species, strains, and/or subtypes of bacteria that are each engineered to comprise the genetic modifications described herein, e.g., to produce EGF.

[0467] In certain embodiments, a combination of two or more different genetically engineered microorganisms can be administered at the same time. In some embodiments, the method comprises administering a subject a combination of two or more genetically engineered microorganisms, a first microorganism which expresses a first payload, and at least a second microorganism which expresses a second payload. In some embodiments, the method comprises compositions comprising a combination of two or more genetically engineered microorganisms, a first microorganisms which expresses a first payload, and at least a second microorganism which expresses a second payload.

[0468] The pharmaceutical compositions described herein may be formulated in a conventional manner using one or more physiologically acceptable carriers comprising excipients and auxiliaries, which facilitate processing of the active ingredients into compositions for pharmaceutical use. Methods of formulating pharmaceutical compositions are known in the art (see, e.g., “Remington's Pharmaceutical Sciences,” Mack Publishing Co., Easton, PA). In some embodiments, the pharmaceutical compositions are subjected to tabletting, lyophilizing, direct compression, conventional mixing, dissolving, granulating, levigating, emulsifying, encapsulating, entrapping, or spray drying to form tablets, granulates, nanoparticles, nanocapsules, microcapsules, microtablets, pellets, or powders, which may be enterically coated or uncoated. Appropriate formulation depends on the route of administration.

[0469] The genetically engineered microorganisms may be formulated into pharmaceutical compositions in any suitable dosage form (e.g., liquids, capsules, sachet, hard capsules, soft capsules, tablets, enteric coated tablets, suspension powders, granules, or matrix sustained release formations for oral administration) and for any suitable type of administration (e.g., oral, topical, injectable, intravenous, sub-cutaneous, immediate-release, pulsatile-release, delayed-release, or sustained release). Suitable dosage amounts for the recombinant bacteria may range from about 10e5 to 10e12 bacteria, e.g., approximately 10e5 bacteria, approximately 10e6 bacteria, approximately 10e7 bacteria, approximately 10e8 bacteria, approximately 10e9 bacteria, approximately 10e10 bacteria, approximately 10e11 bacteria, or approximately 10e12 bacteria. The composition may be administered once or more daily, weekly, or monthly. The composition may be administered before, during, or following a meal. In one embodiment, the pharmaceutical composition is administered before the subject eats a meal. In one embodiment, the pharmaceutical composition is administered concurrently with a meal. In one embodiment, the pharmaceutical composition is administered after the subject eats a meal.

[0470] The recombinant bacteria may be formulated into pharmaceutical compositions comprising one or more pharmaceutically acceptable carriers, thickeners, diluents, buffers, buffering agents, surface active agents, neutral or cationic lipids, lipid complexes, liposomes, penetration enhancers, carrier compounds, and other pharmaceutically acceptable carriers or agents. For example, the pharmaceutical composition may include, but is not limited to, the addition of calcium bicarbonate, sodium bicarbonate, calcium phosphate, various sugars and types of starch, cellulose derivatives, gelatin, vegetable oils, polyethylene glycols, and surfactants, including, for example, polysorbate 20. In some embodiments, the recombinant bacteria may be formulated in a solution of sodium bicarbonate, e.g., 1 molar solution of sodium bicarbonate (to buffer an acidic cellular environment, such as the stomach, for example). The recombinant bacteria may be administered and formulated as neutral or salt forms. Pharmaceutically acceptable salts include those formed with anions such as those derived from hydrochloric, phosphoric, acetic, oxalic, tartaric acids, etc., and those formed with cations such as those derived from sodium, potassium, ammonium, calcium, ferric hydroxides, isopropylamine, triethylamine, 2-ethylamino ethanol, histidine, procaine, etc.

[0471] The genetically engineered microorganisms may be administered intravenously, e.g., by infusion or injection. The genetically engineered microorganisms of the disclosure may be administered intrathecally. In some embodiments, the genetically engineered microorganisms may be administered orally. The genetically engineered microorganisms disclosed herein may be administered topically and formulated in the form of an ointment, cream, transdermal patch, lotion, gel, shampoo, spray, aerosol, solution, emulsion, or other form well known to one of skill in the art. See, e.g., “Remington's Pharmaceutical Sciences,” Mack Publishing Co., Easton, PA. In an embodiment, for non-sprayable topical dosage forms, viscous to semi-solid or solid forms comprising a carrier or one or more excipients compatible with topical application and having a dynamic viscosity greater than water are employed. Suitable formulations include, but are not limited to, solutions, suspensions, emulsions, creams, ointments, powders, liniments, salves, etc., which may be sterilized or mixed with auxiliary agents (e.g., preservatives, stabilizers, wetting agents, buffers, or salts) for influencing various properties, e.g., osmotic pressure. Other suitable topical dosage forms include sprayable aerosol preparations wherein the active ingredient in combination with a solid or liquid inert carrier, is packaged in a mixture with a pressurized volatile (e.g., a gaseous propellant, such as freon) or in a squeeze bottle. Moisturizers or humectants can also be added to pharmaceutical compositions and dosage forms. Examples of such additional ingredients are well known in the art. In one embodiment, the pharmaceutical composition comprising the recombinant bacteria may be formulated as a hygiene product. For example, the hygiene product may be an antibacterial formulation, or a fermentation product such as a fermentation broth. Hygiene products may be, for example, shampoos, conditioners, creams, pastes, lotions, and lip balms.

[0472] The genetically engineered microorganisms disclosed herein may be administered orally and formulated as tablets, pills, dragees, capsules, liquids, gels, syrups, slurries, suspensions, etc. Pharmacological compositions for oral use can be made using a solid excipient, optionally grinding the resulting mixture, and processing the mixture of granules, after adding suitable auxiliaries if desired, to obtain tablets or dragee cores. Suitable excipients include, but are not limited to, fillers such as sugars, including lactose, sucrose, mannitol, or sorbitol; cellulose compositions such as maize starch, wheat starch, rice starch, potato starch, gelatin, gum tragacanth, methyl cellulose, hydroxypropylmethyl-cellulose, sodium carbomethylcellulose; and/or physiologically acceptable polymers such as polyvinylpyrrolidone (PVP) or polyethylene glycol (PEG). Disintegrating agents may also be added, such as cross-linked polyvinylpyrrolidone, agar, alginic acid or a salt thereof such as sodium alginate.

[0473] Tablets or capsules can be prepared by conventional means with pharmaceutically acceptable excipients such as binding agents (e.g., pregelatinised maize starch, polyvinylpyrrolidone, hydroxypropyl methylcellulose, carboxymethylcellulose, polyethylene glycol, sucrose, glucose, sorbitol, starch, gum, kaolin, and tragacanth); fillers (e.g., lactose, microcrystalline cellulose, or calcium hydrogen phosphate); lubricants (e.g., calcium, aluminum, zinc, stearic acid, polyethylene glycol, sodium lauryl sulfate, starch, sodium benzoate, L-leucine, magnesium stearate, talc, or silica); disintegrants (e.g., starch, potato starch, sodium starch glycolate, sugars, cellulose derivatives, silica powders); or wetting agents (e.g., sodium lauryl sulphate). The tablets may be coated by methods well known in the art. A coating shell may be present, and common membranes include, but are not limited to, polylactide, polyglycolic acid, polyanhydride, other biodegradable polymers, alginate-polylysine-alginate (APA), alginate-polymethylene-co-guanidine-alginate (A-PMCG-A), hydroymethylacrylate-methyl methacrylate (HEMA-MMA), multilayered HEMA-MMA-MAA, polyacrylonitrilevinylchloride (PAN-PVC), acrylonitrile/sodium methallylsulfonate (AN-69), polyethylene glycol/poly pentamethylcyclopentasiloxane/polydimethylsiloxane (PEG/PD5/PDMS), poly N,N-dimethyl acrylamide (PDMAAm), siliceous encapsulates, cellulose sulphate/sodium alginate/polymethylene-co-guanidine (CS/A/PMCG), cellulose acetate phthalate, calcium alginate, k-carrageenan-locust bean gum gel beads, gellan-xanthan beads, poly(lactide-co-glycolides), carrageenan, starch poly-anhydrides, starch polymethacrylates, polyamino acids, and enteric coating polymers.

[0474] In some embodiments, the genetically engineered microorganisms are enterically coated for release into the gut or a particular region of the gut, for example, the large intestine. The typical pH profile from the stomach to the colon is about 1-4 (stomach), 5.5-6 (duodenum), 7.3-8.0 (ileum), and 5.5-6.5 (colon). In some diseases, the pH profile may be modified. In some embodiments, the coating is degraded in specific pH environments in order to specify the site of release. In some embodiments, at least two coatings are used. In some embodiments, the outside coating and the inside coating are degraded at different pH levels.

[0475] Liquid preparations for oral administration may take the form of solutions, syrups, suspensions, or a dry product for constitution with water or other suitable vehicle before use. Such liquid preparations may be prepared by conventional means with pharmaceutically acceptable agents such as suspending agents (e.g., sorbitol syrup, cellulose derivatives, or hydrogenated edible fats); emulsifying agents (e.g., lecithin or acacia); non-aqueous vehicles (e.g., almond oil, oily esters, ethyl alcohol, or fractionated vegetable oils); and preservatives (e.g., methyl or propyl-p-hydroxybenzoates or sorbic acid). The preparations may also contain buffer salts, flavoring, coloring, and sweetening agents as appropriate. Preparations for oral administration may be suitably formulated for slow release, controlled release, or sustained release of the genetically engineered microorganisms described herein.

[0476] In one embodiment, the genetically engineered microorganisms of the disclosure may be formulated in a composition suitable for administration to pediatric subjects. As is well known in the art, children differ from adults in many aspects, including different rates of gastric emptying, pH, gastrointestinal permeability, etc. (Ivanovska et al., Pediatrics, 134(2):361-372, 2014). Moreover, pediatric formulation acceptability and preferences, such as route of administration and taste attributes, are critical for achieving acceptable pediatric compliance. Thus, in one embodiment, the composition suitable for administration to pediatric subjects may include easy-to-swallow or dissolvable dosage forms, or more palatable compositions, such as compositions with added flavors, sweeteners, or taste blockers. In one embodiment, a composition suitable for administration to pediatric subjects may also be suitable for administration to adults.

[0477] In one embodiment, the composition suitable for administration to pediatric subjects may include a solution, syrup, suspension, elixir, powder for reconstitution as suspension or solution, dispersible/effervescent tablet, chewable tablet, gummy candy, lollipop, freezer pop, troche, chewing gum, oral thin strip, orally disintegrating tablet, sachet, soft gelatin capsule, sprinkle oral powder, or granules. In one embodiment, the composition is a gummy candy, which is made from a gelatin base, giving the candy elasticity, desired chewy consistency, and longer shelf-life. In some embodiments, the gummy candy may also comprise sweeteners or flavors.

[0478] In one embodiment, the composition suitable for administration to pediatric subjects may include a flavor. As used herein, “flavor” is a substance (liquid or solid) that provides a distinct taste and aroma to the formulation. Flavors also help to improve the palatability of the formulation. Flavors include, but are not limited to, strawberry, vanilla, lemon, grape, bubble gum, and cherry.

[0479] In certain embodiments, the genetically engineered microorganisms may be orally administered, for example, with an inert diluent or an assimilable edible carrier. The compound may also be enclosed in a hard- or soft-shell gelatin capsule, compressed into tablets, or incorporated directly into the subject's diet. For oral therapeutic administration, the compounds may be incorporated with excipients and used in the form of ingestible tablets, buccal tablets, troches, capsules, elixirs, suspensions, syrups, wafers, and the like. To administer a compound by other than parenteral administration, it may be necessary to coat the compound with, or co-administer the compound with, a material to prevent its inactivation.

[0480] In another embodiment, the pharmaceutical composition comprising the recombinant bacteria may be a comestible product, for example, a food product. In one embodiment, the food product is milk, concentrated milk, fermented milk (yogurt, sour milk, frozen yogurt, lactic acid bacteria-fermented beverages), milk powder, ice cream, cream cheeses, dry cheeses, soybean milk, fermented soybean milk, vegetable-fruit juices, fruit juices, sports drinks, confectionery, candies, infant foods (such as infant cakes), nutritional food products, animal feeds, or dietary supplements. In one embodiment, the food product is a fermented food, such as a fermented dairy product. In one embodiment, the fermented dairy product is yogurt. In another embodiment, the fermented dairy product is cheese, milk, cream, ice cream, milk shake, or kefir. In another embodiment, the recombinant bacteria are combined in a preparation containing other live bacterial cells intended to serve as probiotics. In another embodiment, the food product is a beverage. In one embodiment, the beverage is a fruit juice-based beverage or a beverage containing plant or herbal extracts. In another embodiment, the food product is a jelly or a pudding. Other food products suitable for administration of the recombinant bacteria are well known in the art. For example, see U.S. 2015/0359894 and US 2015/0238545, the entire contents of each of which are expressly incorporated herein by reference. In yet another embodiment, the pharmaceutical composition is injected into, sprayed onto, or sprinkled onto a food product, such as bread, yogurt, or cheese.

[0481] In some embodiments, the composition is formulated for intraintestinal administration, intrajejunal administration, intraduodenal administration, intraileal administration, gastric shunt administration, or intracolic administration, via nanoparticles, nanocapsules, microcapsules, or microtablets, which are enterically coated or uncoated. The pharmaceutical compositions may also be formulated in rectal compositions such as suppositories or retention enemas, using, e.g., conventional suppository bases such as cocoa butter or other glycerides. The compositions may be suspensions, solutions, or emulsions in oily or aqueous vehicles, and may contain suspending, stabilizing and/or dispersing agents.

[0482] The genetically engineered microorganisms described herein may be administered intranasally, formulated in an aerosol form, spray, mist, or in the form of drops, and conveniently delivered in the form of an aerosol spray presentation from pressurized packs or a nebulizer, with the use of a suitable propellant (e.g., dichlorodifluoromethane, trichlorofluoromethane, dichlorotetrafluoroethane, carbon dioxide or other suitable gas). Pressurized aerosol dosage units may be determined by providing a valve to deliver a metered amount. Capsules and cartridges (e.g., of gelatin) for use in an inhaler or insufflator may be formulated containing a powder mix of the compound and a suitable powder base such as lactose or starch.

[0483] The genetically engineered microorganisms may be administered and formulated as depot preparations. Such long acting formulations may be administered by implantation or by injection, including intravenous injection, subcutaneous injection, local injection, direct injection, or infusion. For example, the compositions may be formulated with suitable polymeric or hydrophobic materials (e.g., as an emulsion in an acceptable oil) or ion exchange resins, or as sparingly soluble derivatives (e.g., as a sparingly soluble salt).

[0484] In some embodiments, disclosed herein are pharmaceutically acceptable compositions in single dosage forms. Single dosage forms may be in a liquid or a solid form. Single dosage forms may be administered directly to a patient without modification or may be diluted or reconstituted prior to administration. In certain embodiments, a single dosage form may be administered in bolus form, e.g., single injection, single oral dose, including an oral dose that comprises multiple tablets, capsule, pills, etc. In alternate embodiments, a single dosage form may be administered over a period of time, e.g., by infusion.

[0485] Single dosage forms of the pharmaceutical composition may be prepared by portioning the pharmaceutical composition into smaller aliquots, single dose containers, single dose liquid forms, or single dose solid forms, such as tablets, granulates, nanoparticles, nanocapsules, microcapsules, microtablets, pellets, or powders, which may be enterically coated or uncoated. A single dose in a solid form may be reconstituted by adding liquid, typically sterile water or saline solution, prior to administration to a patient.

[0486] In other embodiments, the composition can be delivered in a controlled release or sustained release system. In one embodiment, a pump may be used to achieve controlled or sustained release. In another embodiment, polymeric materials can be used to achieve controlled or sustained release of therapies of the present disclosure (see e.g., U.S. Pat. No. 5,989,463). Examples of polymers used in sustained release formulations include, but are not limited to, poly(2-hydroxy ethyl methacrylate), poly(methyl methacrylate), poly(acrylic acid), poly(ethylene-co-vinyl acetate), poly(methacrylic acid), polyglycolides (PLG), polyanhydrides, poly(N-vinyl pyrrolidone), poly(vinyl alcohol), polyacrylamide, poly(ethylene glycol), polylactides (PLA), poly(lactide-co-glycolides) (PLGA), and polyorthoesters. The polymer used in a sustained release formulation may be inert, free of leachable impurities, stable on storage, sterile, and biodegradable. In some embodiments, a controlled or sustained release system can be placed in proximity of the prophylactic or therapeutic target, thus requiring only a fraction of the systemic dose. Any suitable technique known to one of skill in the art may be used.

[0487] Dosage regimens may be adjusted to provide a therapeutic response. Dosing can depend on several factors, including severity and responsiveness of the disease, route of administration, time course of treatment (days to months to years), and time to amelioration of the disease. For example, a single bolus may be administered at one time, several divided doses may be administered over a predetermined period of time, or the dose may be reduced or increased as indicated by therapeutic situation. The specification for the dosage is dictated by the unique characteristics of the active compound and the particular therapeutic effect to be achieved. Dosage values may vary with the type and severity of the condition to be alleviated. For any particular subject, specific dosage regimens may be adjusted over time according to the individual need and the professional judgment of the treating clinician. Toxicity and therapeutic efficacy of compounds provided herein can be determined by standard pharmaceutical procedures in cell culture or animal models. For example, LD50, ED50, EC50, and IC50 may be determined, and the dose ratio between toxic and therapeutic effects (LD50/ED50) may be calculated as therapeutic index. Compositions that exhibit toxic side effects may be used, with careful modifications to minimize potential damage to reduce side effects. Dosing may be estimated initially from cell culture assays and animal models. The data obtained from in vitro and in vivo assays and animal studies can be used in formulating a range of dosage for use in humans.

[0488] The ingredients are supplied either separately or mixed together in unit dosage form, for example, as a dry lyophilized powder or water-free concentrate in a hermetically sealed container such as an ampoule or sachet indicating the quantity of active agent. If the mode of administration is by injection, an ampoule of sterile water for injection or saline can be provided so that the ingredients may be mixed prior to administration.

[0489] The pharmaceutical compositions may be packaged in a hermetically sealed container such as an ampoule or sachet indicating the quantity of the agent. In one embodiment, one or more of the pharmaceutical compositions is supplied as a dry sterilized lyophilized powder or water-free concentrate in a hermetically sealed container and can be reconstituted (e.g., with water or saline) to the appropriate concentration for administration to a subject. In an embodiment, one or more of the prophylactic or therapeutic agents or pharmaceutical compositions is supplied as a dry sterile lyophilized powder in a hermetically sealed container stored between 2° C. and 8° C. and administered within 1 hour, within 3 hours, within 5 hours, within 6 hours, within 12 hours, within 24 hours, within 48 hours, within 72 hours, or within one week after being reconstituted. Cryoprotectants can be included for a lyophilized dosage form, principally 0-10% sucrose (optimally 0.5-1.0%). Other suitable cryoprotectants include trehalose and lactose. Other suitable bulking agents include glycine and arginine, either of which can be included at a concentration of 0-0.05%, and polysorbate-80 (optimally included at a concentration of 0.005-0.01%). Additional surfactants include but are not limited to polysorbate 20 and BRIJ surfactants. The pharmaceutical composition may be prepared as an injectable solution and can further comprise an agent useful as an adjuvant, such as those used to increase absorption or dispersion, e.g., hyaluronidase.

### Methods of Treatment

[0490] Another aspect provides methods of treating autoimmune disorders, cancer, metabolic diseases, diseases relating to inborn errors of metabolism, neurological or neurodegenerative diseases, diarrheal diseases, IBD, related diseases, and other diseases that benefit from reduced gut inflammation and/or enhanced gut barrier function. In some embodiments, the invention provides for the use of at least one genetically engineered species, strain, or subtype of bacteria described herein for the manufacture of a medicament. In some embodiments, the invention provides for the use of at least one genetically engineered species, strain, or subtype of bacteria described herein for the manufacture of a medicament for treating autoimmune disorders, cancer, metabolic diseases, diseases relating to inborn errors of metabolism, neurological or neurodegenerative diseases, diarrheal diseases, IBD, related diseases, and other diseases that benefit from reduced gut inflammation and/or enhanced gut barrier function. In some embodiments, the invention provides at least one genetically engineered species, strain, or subtype of bacteria described herein for use in treating autoimmune disorders, cancer, metabolic diseases, diseases relating to inborn errors of metabolism, neurological or neurodegenerative diseases, diarrheal diseases, IBD, related diseases, and other diseases that benefit from reduced gut inflammation and/or enhanced gut barrier function.

[0491] In some embodiments, the diarrheal disease is selected from the group consisting of acute watery diarrhea, e.g., cholera, acute bloody diarrhea, e.g., dysentery, and persistent diarrhea. In some embodiments, the IBD or related disease is selected from the group consisting of Crohn's disease, ulcerative colitis, collagenous colitis, lymphocytic colitis, diversion colitis, Behcet's disease, intermediate colitis, short bowel syndrome, ulcerative proctitis, proctosigmoiditis, left-sided colitis, pancolitis, gastric ulcers, duodenal ulcers, and fulminant colitis.

[0492] In some embodiments, the disease or condition is an autoimmune disorder selected from the group consisting of acute disseminated encephalomyelitis (ADEM), acute necrotizing hemorrhagic leukoencephalitis, Addison's disease, agammaglobulinemia, alopecia areata, amyloidosis, ankylosing spondylitis, anti-GBM/anti-TBM nephritis, antiphospholipid syndrome (APS), autoimmune angioedema, autoimmune aplastic anemia, autoimmune dysautonomia, autoimmune hemolytic anemia, autoimmune hepatitis, autoimmune hyperlipidemia, autoimmune immunodeficiency, autoimmune inner ear disease (AIED), autoimmune myocarditis, autoimmune oophoritis, autoimmune pancreatitis, autoimmune retinopathy, autoimmune thrombocytopenic purpura (ATP), autoimmune thyroid disease, autoimmune urticarial, axonal & neuronal neuropathies, Balo disease, Behcet's disease, bullous pemphigoid, cardiomyopathy, Castleman disease, celiac disease, Chagas disease, chronic inflammatory demyelinating polyneuropathy (CIDP), chronic recurrent multifocal ostomyelitis (CRMO), Churg-Strauss syndrome, cicatricial pemphigoid/benign mucosal pemphigoid, Crohn's disease, Cogan's syndrome, cold agglutinin disease, congenital heart block, Coxsackie myocarditis, CREST disease, essential mixed cryoglobulinemia, demyelinating neuropathies, dermatitis herpetiformis, dermatomyositis, Devic's disease (neuromyelitis optica), discoid lupus, Dressler's syndrome, endometriosis, eosinophilic esophagitis, eosinophilic fasciitis, erythema nodosum, experimental allergic encephalomyelitis, Evans syndrome, fibrosing alveolitis, giant cell arteritis (temporal arteritis), giant cell myocarditis, glomerulonephritis, Goodpasture's syndrome, granulomatosis with polyangiitis (GPA), Graves' disease, Guillain-Barre syndrome, Hashimoto's encephalitis, Hashimoto's thyroiditis, hemolytic anemia, Henoch-Schonlein purpura, herpes gestationis, hypogammaglobulinemia, idiopathic thrombocytopenic purpura (ITP), IgA nephropathy, IgG4-related sclerosing disease, immunoregulatory lipoproteins, inclusion body myositis, interstitial cystitis, juvenile arthritis, juvenile idiopathic arthritis, juvenile myositis, Kawasaki syndrome, Lambert-Eaton syndrome, leukocytoclastic vasculitis, lichen planus, lichen sclerosus, ligneous conjunctivitis, linear IgA disease (LAD), lupus (systemic lupus erythematosus), chronic Lyme disease, Meniere's disease, microscopic polyangiitis, mixed connective tissue disease (MCTD), Mooren's ulcer, Mucha-Habermann disease, multiple sclerosis, myasthenia gravis, myositis, narcolepsy, neuromyelitis optica (Devic's), neutropenia, ocular cicatricial pemphigoid, optic neuritis, palindromic rheumatism, PANDAS (Pediatric Autoimmune Neuropsychiatric Disorders Associated with Streptococcus), paraneoplastic cerebellar degeneration, paroxysmal nocturnal hemoglobinuria (PNH), Parry Romberg syndrome, Parsonnage-Turner syndrome, pars planitis (peripheral uveitis), pemphigus, peripheral neuropathy, perivenous encephalomyelitis, pernicious anemia, POEMS syndrome, polyarteritis nodosa, type I, II, & III autoimmune polyglandular syndromes, polymyalgia rheumatic, polymyositis, postmyocardial infarction syndrome, postpericardiotomy syndrome, progesterone dermatitis, primary biliary cirrhosis, primary sclerosing cholangitis, psoriasis, psoriatic arthritis, idiopathic pulmonary fibrosis, pyoderma gangrenosum, pure red cell aplasia, Raynaud's phenomenon, reactive arthritis, reflex sympathetic dystrophy, Reiter's syndrome, relapsing polychondritis, restless legs syndrome, retroperitoneal fibrosis, rheumatic fever, rheumatoid arthritis, sarcoidosis, Schmidt syndrome, scleritis, scleroderma, Sjogren's syndrome, sperm & testicular autoimmunity, stiff person syndrome, subacute bacterial endocarditis (SBE), Susac's syndrome, sympathetic ophthalmia, Takayasu's arteritis, temporal arteritis/giant cell arteritis, thrombocytopenic purpura (TTP), Tolosa-Hunt syndrome, transverse myelitis, type 1 diabetes, asthma, ulcerative colitis, undifferentiated connective tissue disease (UCTD), uveitis, vasculitis, vesiculobullous dermatosis, vitiligo, and Wegener's granulomatosis. In some embodiments, the invention provides methods for reducing, ameliorating, or eliminating one or more symptom(s) associated with these diseases, including but not limited to diarrhea, bloody stool, mouth sores, perianal disease, abdominal pain, abdominal cramping, fever, fatigue, weight loss, iron deficiency, anemia, appetite loss, weight loss, anorexia, delayed growth, delayed pubertal development, and inflammation of the skin, eyes, joints, liver, and bile ducts. In some embodiments, the invention provides methods for reducing gut inflammation and/or enhancing gut barrier function, thereby ameliorating or preventing a systemic autoimmune disorder, e.g., asthma (Arrieta et al., 2015).

[0493] The method may comprise preparing a pharmaceutical composition with at least one genetically engineered species, strain, or subtype of bacteria described herein, and administering the pharmaceutical composition to a subject in a therapeutically effective amount.

[0494] In certain embodiments, the pharmaceutical composition described herein is administered to reduce gut inflammation, enhance gut barrier function, and/or treat or prevent an autoimmune disorder in a subject. In some embodiments, the methods of the present disclosure may reduce gut inflammation in a subject by at least about 10%, 20%, 25%, 30%, 40%, 50%, 60%, 70%, 75%, 80%, 85%, 90%, 95%, or more as compared to levels in an untreated or control subject. In some embodiments, the methods of the present disclosure may enhance gut barrier function in a subject by at least about 10%, 20%, 25%, 30%, 40%, 50%, 60%, 70%, 75%, 80%, 85%, 90%, 95%, or more as compared to levels in an untreated or control subject. In some embodiments, changes in inflammation and/or gut barrier function are measured by comparing a subject before and after administration of the pharmaceutical composition. In some embodiments, the method of treating or ameliorating the autoimmune disorder and/or the disease or condition associated with gut inflammation and/or compromised gut barrier function allows one or more symptoms of the disease or condition to improve by at least about 10%, 20%, 30%, 40%, 50%, 60%, 70%, 80%, 90%, 95%, or more.

[0495] In some embodiments, reduction is measured by comparing the levels of inflammation in a subject before and after administration of the pharmaceutical composition. In one embodiment, the levels of inflammation is reduced in the gut of the subject. In one embodiment, gut barrier function is enhanced in the gut of the subject. In another embodiment, levels of inflammation is reduced in the blood of the subject. In another embodiment, the levels of inflammation is reduced in the plasma of the subject. In another embodiment, levels of inflammation is reduced in the brain of the subject.

[0496] In one embodiment, the pharmaceutical composition described herein is administered to reduce levels of inflammation in a subject to normal levels. In another embodiment, the pharmaceutical composition described herein is administered to reduce levels of inflammation in a subject below normal.

[0497] In some embodiments, the method of treating the autoimmune disorder allows one or more symptoms of the condition or disorder to improve by at least about 10%, 20%, 30%, 40%, 50%, 60%, 70%, 80%, 90%, 95%, or more. In some embodiments, the method of treating the disorder, allows one or more symptoms of the condition or disorder to improve by at least about two-fold, three-fold, four-fold, five-fold, six-fold, seven-fold, eight-fold, nine-fold, or ten-fold.

[0498] Before, during, and after the administration of the pharmaceutical composition, gut inflammation and/or barrier function in the subject may be measured in a biological sample, such as blood, serum, plasma, urine, fecal matter, peritoneal fluid, intestinal mucosal scrapings, a sample collected from a tissue, and/or a sample collected from the contents of one or more of the following: the stomach, duodenum, jejunum, ileum, cecum, colon, rectum, and anal canal. In some embodiments, the methods may include administration of the compositions to enhance gut barrier function and/or to reduce gut inflammation to baseline levels, e.g., levels comparable to those of a healthy control, in a subject. In some embodiments, the methods may include administration of the compositions to reduce gut inflammation to undetectable levels in a subject, or to less than about 1%, 2%, 5%, 10%, 20%, 25%, 30%, 40%, 50%, 60%, 70%, 75%, or 80% of the subject's levels prior to treatment. In some embodiments, the methods may include administration of the compositions to enhance gut barrier function in a subject by about 1%, 2%, 5%, 10%, 20%, 25%, 30%, 40%, 50%, 60%, 70%, 75%, 80%, 90%, 100% or more of the subject's levels prior to treatment.

[0499] In certain embodiments, the recombinant bacteria are E. coli Nissle. The recombinant bacteria may be destroyed, e.g., by defense factors in the gut or blood serum (Sonnenborn et al., 2009) or by activation of a kill switch, several hours or days after administration. Thus, the pharmaceutical composition comprising the recombinant bacteria may be re-administered at a therapeutically effective dose and frequency. In alternate embodiments, the recombinant bacteria are not destroyed within hours or days after administration and may propagate and colonize the gut.

[0500] The pharmaceutical composition may be administered alone or in combination with one or more additional therapeutic agents, e.g., corticosteroids, aminosalicylates, anti-inflammatory agents. In some embodiments, the pharmaceutical composition is administered in conjunction with an anti-inflammatory drug (e.g., mesalazine, prednisolone, methylprednisolone, butesonide), an immunosuppressive drug (e.g., azathioprine, 6-mercaptopurine, methotrexate, cyclosporine, tacrolimus), an antibiotic (e.g., metronidazole, ornidazole, clarithromycin, rifaximin, ciprofloxacin, anti-TB), other probiotics, and/or biological agents (e.g., infliximab, adalimumab, certolizumab pegol) (Triantafillidis et al., 2011). An important consideration in the selection of the one or more additional therapeutic agents is that the agent(s) should be compatible with the recombinant bacteria, e.g., the agent(s) must not kill the bacteria. In one embodiment, the bacterial cells disclosed herein are administered to a subject once daily. In another embodiment, the bacterial cells disclosed herein are administered to a subject twice daily. In another embodiment, the bacterial cells disclosed herein are administered to a subject in combination with a meal, prior to a meal, or after a meal. The dosage of the pharmaceutical composition and the frequency of administration may be selected based on the severity of the symptoms and the progression of the disease. The appropriate therapeutically effective dose and/or frequency of administration can be selected by a treating clinician.

[0501] Another aspect provides methods of treating cancer. In some embodiments, the invention provides methods for reducing, ameliorating, or eliminating one or more symptom(s) associated with cancer. In some embodiments, the cancer is selected from adrenal cancer, adrenocortical carcinoma, anal cancer, appendix cancer, bile duct cancer, bladder cancer, bone cancer (e.g., Ewing sarcoma tumors, osteosarcoma, malignant fibrous histiocytoma), brain cancer (e.g., astrocytomas, brain stem glioma, craniopharyngioma, ependymoma), bronchial tumors, central nervous system tumors, breast cancer, Castleman disease, cervical cancer, colon cancer, rectal cancer, colorectal cancer, endometrial cancer, esophageal cancer, eye cancer, gallbladder cancer, gastrointestinal cancer, gastrointestinal carcinoid tumors, gastrointestinal stromal tumors, gestational trophoblastic disease, heart cancer, Kaposi sarcoma, kidney cancer, largyngeal cancer, hypopharyngeal cancer, leukemia (e.g., acute lymphoblastic leukemia, acute myeloid leukemia, chronic lymphocytic leukemia, chronic myelogenous leukemia), liver cancer, lung cancer, lymphoma (e.g., AIDS-related lymphoma, Burkitt lymphoma, cutaneous T cell lymphoma, Hodgkin's lymphoma, Non-Hodgkin's lymphoma, primary central nervous system lymphoma), malignant mesothelioma, multiple myeloma, myelodysplastic syndrome, nasal cavity cancer, paranasal sinus cancer, nasopharyngeal cancer, neuroblastoma, oral cavity cancer, oropharyngeal cancer, osteosarcoma, ovarian cancer, pancreatic cancer, penile cancer, pituitary tumors, prostate cancer, retinoblastoma, rhabdomyosarcoma, rhabdoid tumor, salivary gland cancer, sarcoma, skin cancer (e.g., basal cell carcinoma, melanoma), small intestine cancer, stomach cancer, teratoid tumor, testicular cancer, throat cancer, thymus cancer, thyroid cancer, unusual childhood cancers, urethral cancer, uterine cancer, uterine sarcoma, vaginal cancer, vulvar cancer, Waldenström macrogloblulinemia, and Wilms tumor. In some embodiments, the symptom(s) associated thereof include, but are not limited to, anemia, loss of appetite, irritation of bladder lining, bleeding and bruising (thrombocytopenia), changes in taste or smell, constipation, diarrhea, dry mouth, dysphagia, edema, fatigue, hair loss (alopecia), infection, infertility, lymphedema, mouth sores, nausea, pain, peripheral neuropathy, tooth decay, urinary tract infections, and/or problems with memory and concentration.

[0502] In certain embodiments, administering the pharmaceutical composition to the subject reduces cell proliferation, tumor growth, and/or tumor volume in a subject. In some embodiments, the methods of the present disclosure may reduce cell proliferation, tumor growth, and/or tumor volume by at least about 10%, 20%, 25%, 30%, 40%, 50%, 60%, 70%, 75%, 80%, 85%, 90%, 95%, or more as compared to levels in an untreated or control subject. In some embodiments, reduction is measured by comparing cell proliferation, tumor growth, and/or tumor volume in a subject before and after administration of the pharmaceutical composition. In some embodiments, the method of treating or ameliorating a cancer in a subject allows one or more symptoms of the cancer to improve by at least about 10%, 20%, 30%, 40%, 50%, 60%, 70%, 80%, 90%, 95%, or more.

[0503] Before, during, and after the administration of the pharmaceutical composition, cancerous cells and/or biomarkers in a subject may be measured in a biological sample, such as blood, serum, plasma, urine, peritoneal fluid, and/or a biopsy from a tissue or organ. In some embodiments, the methods may include administration of the compositions to reduce tumor volume in a subject to an undetectable size, or to less than about 1%, 2%, 5%, 10%, 20%, 25%, 30%, 40%, 50%, 60%, 70%, 75%, 80%, or 90% of the subject's tumor volume prior to treatment. In other embodiments, the methods may include administration of the compositions to reduce the cell proliferation rate or tumor growth rate in a subject to an undetectable rate, or to less than about 1%, 2%, 5%, 10%, 20%, 25%, 30%, 40%, 50%, 60%, 70%, 75%, 80%, or 90% of the rate prior to treatment.

[0504] The recombinant bacteria may be destroyed, e.g., by defense factors in tissues or blood serum (Sonnenborn et al., 2009), or by activation of a kill switch, several hours or days after administration. Thus, the pharmaceutical composition comprising the gene or gene cassette for producing the anti-cancer molecule may be re-administered at a therapeutically effective dose and frequency. In alternate embodiments, the recombinant bacteria are not destroyed within hours or days after administration and may propagate and colonize the tumor.

[0505] The immunostimulatory activity of bacterial DNA is mimicked by synthetic oligodeoxynucleotides (ODNs) expressing unmethylated CpG motifs. Bode et al., Expert Rev Vaccines. 2011 April; 10(4): 499-511. CpG DNA as a vaccine adjuvant. When used as vaccine adjuvants, CpG ODNs improve the function of professional antigen-presenting cells and boost the generation of humoral and cellular vaccine-specific immune responses. In some embodiments, CpG can be administered in combination with the genetically engineered bacteria of the invention.

[0506] In one embodiment, the genetically engineered microorganisms are administered in combination with tumor cell lysates.

[0507] The dosage of the pharmaceutical composition and the frequency of administration may be selected based on the severity of the symptoms and the progression of the cancer. The appropriate therapeutically effective dose and the frequency of administration can be selected by a treating clinician.

### EXAMPLES

[0508] The following examples provide illustrative embodiments of the disclosure. One of ordinary skill in the art will recognize the numerous modifications and variations that may be performed without altering the spirit or scope of the disclosure. Such modifications and variations are encompassed within the scope of the disclosure. The Examples do not in any way limit the disclosure.

### Example 1. EGF Strain Construction

[0509] The human epidermal growth factor (hEGF) cDNA sequence was sourced from NCBI accession number: gq214314.1 and codon optimized for expression in E. coli. Sec secretion signal-hEGF fusion protein sequences were designed by adding the codon optimized hEGF sequence to the N-terminal sec secretion signal sequence of PhoA (21 amino acids), PelB (22 amino acids), or OmpA (21 amino acids). dsDNA encoding each fusion protein open reading frame was synthesized with the addition of a strong 5′ ribosome binding site (RBS) upstream of the start codon and 20 bp flanking homology to an expression vector containing a p15a origin of replication, kanamycin resistance cassette, and the PfnrS promoter from the fumarate and nitrate reductase gene S in E. coli Nissle. Gibson assembly methods yielded expression plasmids for PhoA-hEGF (p15a_Kan_fnr_PhoA-EGF), PelB-hEGF (p15a_Kan_fnr_PelB-EGF) and OmpA-hEGF (p15a_Kan_fnr_OmpA-EGF) (Sequences O, P, Q). Each construct was confirmed via PCR amplification and sequencing.

[0510] A second set of expression constructs was created by synthesizing each fusion protein downstream of the c1857 temperature responsive promoter and corresponding repressor protein derived from lambda phage, a 5′ RBS, and 20 bp flanking homology. Synthesized expression constructs were introduced into an expression vector containing a p15a origin of replication and kanamycin resistance cassette using Gibson assembly methods to yield (p15a_Kan_c1857_PhoA-EGF, SeqNo 4), (p15a_Kan_cI857_PelB-EGF, Seq No 5), and (p15a_Kan_cI857_OmpA-EGF, Seq No 6).

[0511] An expression vector containing SC101 origin of replication and Carbenicillin resistance cassette was used to express all three units of prtDEF ABC transporter: prtD (ATP-binding cassette), prtE (membrane fusion protein), and prtF (outer membrane protein) from E. chrysanthemi. Each unit was codon optimized for E. coli, and the synthesized expression construct consisted of a temperature sensitive promoter (cI857), a ribosome binding site (RBS) upstream of each unit (prtD, prtE and prtF) respectively, and included a 20 bp flanking homology to the expression vector. Gibson assembly methods was used to assemble the expression constructs into their respective expression vector, which resulted in following expression plasmids: hEGF-LARD3 (p15a_Kan_cI857_EGF-LARD3, SeqNo AC, hEGF-HlyA (p15a_KAN_T857_EGF-HlyA, Seq No AD) and prtDEF (pSC101_Carb_c1857_PtDEF, Seq No AG). Each construct was confirmed via PCR amplification and sequencing. Expression plasmids were introduced into SYN094, a wild type E. coli Nissle strain in sets of two: hEGF-LARD3 & prtDEF or hEGF-HlyA & prtDEF, which generated strains SYN7984 & SYN7985 respectively (Table 17).

[0512] To create a Gram-negative bacterium capable of secreting bioactive proteins, a diffusible outer membrane (DOM) phenotype in the E. coli Nissle background was engineered by deleting the gene encoding the periplasmic protein pal. This alteration results in an increased rate of diffusion of periplasmic proteins to the external environment without compromising cell growth properties. The resulting “leaky membrane” chassis strain is designated SYN1557. Each expression plasmid was introduced into either SYN094, a wild type E. coli Nissle strain, or SYN1557, E. coli Nissle containing a deletion of the pal gene (DOM), generating strains SYN7881-SYN7886, SYN7838-SYN7839, and SYN9001-SYN9004 (Table 17).

TABLE 17
EcN strains expressing secretion fusion proteins.

| Strains | # |
|---|---|
| Syn094 + p15a_Kan_fnr_PhoA-EGF | SYN7881 |
| Syn094 + p15a_Kan_fnr_PelB-EGF | SYN7882 |
| Syn094 + p15a_Kan_fnr_OmpA-EGF | SYN7883 |
| Syn1557 + p15a_Kan_fnr_PhoA-EGF | SYN7884 |
| Syn1557 + p15a_Kan_fnr_PelB-EGF | SYN7885 |
| Syn1557+ p15a_Kan_fnr_OmpA-EGF | SYN7886 |
| Syn094 + p15a_Kan_cI857_PhoA-EGF | SYN7938 |
| Syn094 + p15a_Kan_cI857_PelB-EGF | SYN9001 |
| Syn094 + p15a_Kan_cI857_OmpA-EGF | SYN9002 |
| Syn1557 + p15a_Kan_cI857_PhoA-EGF | SYN7939 |
| Syn1557 + p15a_Kan_cI857_PelB-EGF | SYN9003 |
| Syn1557 + p15a_Kan_cI857_OmpA-EGF | SYN9004 |
| Syn094 + p15a_Kan_cI857_EGF-LARD3 + | SYN7984 |
| pSC101_Carb_cI857_PrtDEF | |
| Syn094 + p15a_Kan_cI857_EGF-HlyA + | SYN7985 |
| pSC101_Carb_cI857_PrtDEF | |

### Example 2. EGF Production

[0513] To assay for production of EGF from engineered strains, cells were grown overnight in 10 ml of LB media containing respective antibiotics (Kanamycin 50 for EGF plasmids in all strains, and Chloramphenicol 30 for DOM chassis) in 50 ml baffled flasks, 250 rpm. 4 ml of overnight culture was added to 100 ml of LB (containing respective antibiotics) in a 250 ml baffled flask, 37C, 250 RPM. After 4 hours, OD 600 was measured for all cells and specific volumes of the cultures were spun down and resuspended in 10 mL of fresh LB (+respective antibiotics) to yield a 10 mL culture with a final OD 600 of 2.5. Cultures were then poured in 50 ml flask and were left for 5 hours in anaerobic chamber to induce the PfnrS promoter. After induction, cultures were spun down for 8 minutes, 8000 RPM, supernatants were filtered with a 0.22 micron PES filter and used for ELISA analysis.

### Example 3. EGF in Bacterial Supernatants

[0514] EGF was measured in bacterial supernatants using a human EGF specific ELISA kit from R&D systems as per the manufacturer's instructions (Cat. number DY236). Briefly, supernatants are diluted into the working range of the assay, added to wells coated with a monoclonal mouse anti-human EGF antibody specific for human EGF and incubated for one hour. Following a wash step, a polyclonal biotinylated goat anti-human EGF antibody is added and incubated for two hours. Following a second wash step, streptavidin-horseradish peroxidase is added and incubated for 20 minutes. After an additional wash step, the HRP substrate tetramethylbenzidine and hydrogen peroxide are added and incubated for 20 minutes. A stop solution of sulfuric acid is then added and 450 nm absorbance recorded. EGF concentrations of the unknowns are calculated against a standard curve constructed from recombinant EGF processed concurrently as above. EGF was measured for the EGF-secreting strains with this method.

### Example 4. EGF Activity in Human Cell Lines

[0515] HCT116 (ATCC, cat. number CCL-247) or HT29 cells (ATCC, cat. number HTB-38) were used to measure activity of recombinant EGF secreted into the supernatant of engineered E coli strains. Briefly, cells were treated with varying concentrations of EGF for 5 minutes, after which media was removed and the cells were washed one time with PBS. Lysis buffer specific for the downstream application was used to lyse the cells in preparation for further analysis. For experiments using the EGFR inhibitor AG-1478, inhibitor was added to the wells 1 hr before treatment of EGF containing samples to a final concentration of 1 uM.

[0516] For analysis by western blot, cells in a 24 well dish were lysed with 200 uL of RIPA buffer containing the recommended amount of HALT protease and phosphatase inhibitor (ThermoFisher, cat. Number 78442). Samples were left to lyse at 4° C. for 15 minutes. After lysis, samples were transferred to a 1.5 mL Eppendorf tube and spun down at 15,000 g for 15 minutes at 4° C. 7 uL of clarified lysate was added to 6 uL of DI water, 5 uL of LDS samples buffer (4×), and 2 uL of reducing agent (10×). Samples were heated to 70° C. for 10 minutes. Samples were run on a NuPage protein gel and transferred to a pvdf membrane using the iBlot2 transfer device per the manufacturer's specifications. Membrane was blocked with 5% BSA in TBST overnight and probed for EGFR, AKT, ERK, pEGFR, pAKT, and pERK using commercially available antibodies.

[0517] For analysis by ELISA, cells in a 96-well plate were lysed with 100 uL of lysis buffer specific for target phospho-protein of interest as specified by the manufacturer's instructions. All lysis buffer was supplemented with Halt Protease and Phosphatase inhibitor (ThermoFisher, cat. Number 78442). For phospho-EGFR, DuoSet Human Phospho-EGFR ELISA kit (R&D Systems, cat. Number, DYC1095B-5) was used. For phosphor-ERK, DuoSet Phospho-ERK1/ERK2 ELISA kit (R&D Systems, cat. Number, DYC1018B-5) was used. For phosphor-AKT, DuoSet Phospho-AKT1 ELISA kit (R&D Systems, cat. Number, DYC2289C-2) was used. After lysis, cells were spun down in the 96-well plate at 500 g for 15 minutes at 4° C. Supernatant was gently removed and diluted based on manufacturer's instructions.

### Example 5: EGF Production—Temperature Sensitive Promoter

[0518] Cultures were set up for overnight growth at 30° C. Overnight cultures were subcultured, 4 mL in 100 mL of the same media used in the overnight culture. Subcultures were placed at 30° C. in a shaking incubator. After around 3 hr, cells were removed from the incubator and ODs were taken. To calculate the amount of the morning culture to spin down and then resuspend in 10 mL, X was solved using:

(OD of morning culture)(X mL of culture to spin down)=(Desired OD−OD of 2.5 is standard) (10 mL final volume)

The volume of cells calculated for each culture was spun down at 5,000 g for 5 minutes. Supernatant was removed from pelleted cells and the cells were then resuspended in 10 mL fresh media and appropriate antibiotics. ODs of these cultures were taken as well to give the starting OD at the beginning of induction, e.g., close to 2.5. Cultures were placed at 37° C. in a shaking incubator to induce protein expression. As a control, separate cultures set to the same initial OD were placed at 30° C. in a shaking incubator. After 4 hr, aliquots of the culture were spun down at 5,000 g for 5 minutes and supernatant was collected for further downstream analysis. ODs and CFUs were collected for these cultures at each timepoint. Supernatant EGF was measured in an ELISA (R&D Systems) as shown in Table 18.

TABLE 18
EGF Production

| | | | μg hEGF/5e11 |
|---|---|---|---|
| Chassis | Strain | OD | cells over 5 hours |
| WT | Syn094-CI-PhoA-EGF | 2.5 | 2.6 |
| DOM | Syn1557-CI-PhoA-EGF | 2.5 | 69.9 |

### Example 6: EGF Production—FNR Promoter

[0519] Cultures were set up for overnight growth at 37° C. In the morning, overnight cultures were subcultured, 4 mL in 100 mL of the same media used in the overnight culture. Subcultures were placed at 37° C. in a shaking incubator. After around 3 hr, cells were removed from the incubator and ODs were taken. To calculate the amount of the morning culture to spin down and then resuspend in 10 mL, X was solved using:

(OD of morning culture)(X mL of culture to spin down)=(Desired OD→OD of 2.5 for low density, 5.0 for medium density and 10.0 for high density) (10 mL final volume)

The volume of cells calculated for each culture was spun down at 5,000 g for 5 minutes. Supernatant was removed from pelleted cells and the cells were then resuspended in 10 mL fresh media and appropriate antibiotics. ODs of these cultures were taken as well to give the starting OD at the beginning of induction, e.g., close to the calculated OD. Cultures were brought into a vinyl anaerobic chamber (Coy Lab Products, 5% H₂ gas mix) and placed in a standing 37° C. incubator within the chamber to induce protein expression. After 5 hr, aliquots of the culture were spun down at 5,000 g for 5 minutes and supernatant was collected for further downstream analysis. ODs and CFUs were collected for these cultures at the 5 hr timepoint. Supernatant EGF was measured in an ELISA (R&D Systems) as shown in Table 19.

TABLE 19
EGF Production

| | | | μg hEGF/5e11 |
|---|---|---|---|
| Chassis | Strain | OD | cells over 5 hours |
| WT | Syn094-EGF-PhoA | 5.0 | 0.665 |
| WT | Syn094-EGF-PelB | 5.0 | 0.4 |
| WT | Syn094-EGF-OmpA | 10 | 0.16 |
| WT | Syn094-EGF-OmpA | 5 | 0.75 |
| WT | Syn094-EGF-OmpA | 2.5 | 1.27 |
| DOM | Syn1557-EGF-PhoA | 5.0 | 8.35 |
| DOM | Syn1557-EGF-PelB | 5.0 | 3.78 |
| DOM | Syn1557-EGF-OmpA | 10 | 0.4 |
| DOM | Syn1557-EGF-OmpA | 5 | 5.81 |
| DOM | Syn1557-EGF-OmpA | 2.5 | 8.02 |

### Example 7: EGF Production—FNR Promoter

[0520] Cultures were set up for overnight growth at 37° C. In the morning, overnight cultures were subcultured, 4 mL in 100 mL of the same media used in the overnight culture. Subcultures were placed at 37° C. in a shaking incubator. After around 3 hr, cells were removed from the incubator and ODs were taken. To calculate the amount of the morning culture to spin down and then resuspend in 10 mL, X was solved using:

(OD of morning culture)(X mL of culture to spin down)=(Desired OD→OD of 2.5 for low density, 5.0 for medium density and 10.0 for high density) (10 mL final volume)

The volume of cells we calculated for each culture was spun down at 5,000 g for 5 minutes. Supernatant was removed from pelleted cells and the cells were then resuspended in 10 mL fresh media and appropriate antibiotics. ODs of these cultures were taken as well to give the starting OD at the beginning of induction, e.g., close to the calculated OD. Cultures were placed at 37° C. in a shaking incubator to induce protein expression. After 5 hr, aliquots of the culture were spun down at 5,000 g for 5 minutes and supernatant was collected for further downstream analysis. ODs and CFUs were collected for these cultures at the 5 hr timepoint. Supernatant EGF was measured in an ELISA (R&D Systems) as shown in Table 20.

TABLE 20
EGF Production

| | | | μg hEGF/5e11 |
|---|---|---|---|
| Chassis | Strain | OD | cells for 5 hr |
| WT | Syn094-EGF-OmpA | 2.5 | 17.55 |
| DOM | Syn1557-EGF-OmpA | 2.5 | 94.65 |

### Example 8: Prototype Strains

[0521] Next, additional plasmid-based, engineered E. coli Nissle 1917 strains that secrete human EGF (EcNEGF prototypes) were constructed using EcN background strains (chassis) harboring features that are advantageous for clinical development of engineered live bacterial therapeutics. The EcN chassis used in this study are described in Table 21.

TABLE 21
Chassis modifications

Chassis Name

| | | Chassis B |
|---|---|---|
| | Chassis A | (SYN8064, |
| . Chassis modifications | (SYN8032) | SYN8248) |
| Phage 3 Knockout | Yes | Yes |
| Colibactin Knockout(Δpks island) | Yes | Yes |
| Thymidine auxotrophy (ΔthyA) | Yes | Yes |
| Diffusible Outer Membrane(Δpal) | Yes | No |

[0522] Selected prototypes for secretion of bioactive human EGF are shown in Table 22. These strains include variants on both Chassis A (diffusible outer membrane) and Chassis B (wild-type membrane) backgrounds, as well as EGF under the control of temperature-inducible (cI857) or anaerobic-inducible (FNR) promoters. All strains used in this study harbor the human EGF constructs on medium-copy plasmids.

TABLE 22
EcN-EGF Plasmid-Based Prototypes

| | Strain | | EGF | EGF secretion |
|---|---|---|---|---|
| Strain ID | Description | Chassis | promoter | peptide |
| SYN8062 | A-Temp | A | cI857 | OmpA |
| SYN8063 | A-FNR | A | FNR | OmpA |
| SYN8065 | B-Temp | B | cI857 | OmpA |
| SYN8066 | B-FNR | B | FNR | OmpA |

[0523] Biomass of EcN-EGF prototypes used in this study are described in Table 23. EcN-EGF biomass was prepared in AMBR250 bioreactors, using Fermentation Medium 3 (FM3) containing 10 mM Thymidine. The bioreactors were inoculated at 0.5 OD (600 nm) from overnight seed cultures. Cells were centrifuged at 7,800×g and resuspended in 100 mM phosphate buffer containing 15% glycerol. EcN-EGF aliquots were stored at −80° C. Total cells/mL in frozen aliquots were enumerated using by Cellometer assay (K2 Matrix software, Nexelcom, Inc.). Percent viability was determined by Sytox exclusion dye assay (ThermoFisher Scientific Catalog Num. 534862).

TABLE 23
EcN-EGF Prototype Biomass Used in This Study

| | Strain | Total Cells/mL | % Viability |
|---|---|---|---|
| Strain ID | Description | (Mean ± SEM) | (Mean ± SEM) |
| SYN8062 | A-Temp | 8.86E+10 ± 2.15E+09 | 95.27 ± 0.26 |
| SYN8063 | A-FNR | 3.40E+10 ± 5.51E+08 | 87.23 ± 1.12 |
| SYN8065 | B-Temp | 5.35E+10 ± 1.77E+09 | 92.68 ± 0.82 |
| SYN8066 | B-FNR | 6.31E+10 ± 4.93E+09 | 91.38 ± 1.23 |

### Example 9: Secretion of Bioactive Human EGF by EcN-Egf Prototypes

[0524] In Vitro hEGF Production Assay

[0525] Frozen aliquots of each EcN-EGF prototype were removed from −80° C. and thawed on ice. A 30 mL aliquot of FM3 containing 50 μg/mL kanamycin was prepared for each prototype strain. Total cells/mL in frozen aliquots were enumerated using by Cellometer assay (K2 Matrix software, Nexelcom, Inc.). In vitro hEGF production assays were performed by adjusting EcN-EGF cell density 2.5×10⁹ total cells/mL.

[0526] Thawed EcN-EGF cells were added to the 30 mL media to obtain a final concentration of 2.5×10⁹ total cells/mL. Resuspended EcN-EGF cultures were then split into three 10 mLaliquots in 50 mL flasks and incubated at 37° C. under atmospheric conditions in a shaking incubator at 250 rpm for 8 hrs.

[0527] EGF-containing supernatants were then collected by centrifuging cultures at 4,000 rpm for 10 mins in a benchtop hanging bucket centrifuge. Supernatant samples were frozen and stored at −80° C. until EGF quantitation by ELISA.

In Vitro hEGF Bioactivity Assay

[0528] HT-29 cells were seeded into a 96-well tissue culture treated plate at 90,000 cells in 90 uL and incubated overnight in a tissue culture incubator to adhere to the plate. The following morning, 10 uL of desired treatment was added to each of the wells with four replicates for each treatment group and incubated for 5 minutes. After 5 minutes stimulation, the supernatant was removed from the 96-well plate by flicking and 75 uL of Lysis buffer #4 (Cisbio Cat. number 64KL4FDF) with Halt protease/phosphatase inhibitor (Halt™ Protease and Phosphatase Inhibitor Cocktail(100×)) was added to the cells. Lysates were then stored in a −80° C. freezer until pEGFR quantitation by FRET assay.

### Bioanalytical Methods

[0529] hEGF Quantitation

[0530] EGF was measured in bacterial supernatants using a human EGF specific ELISA kit from R&D systems as per the manufacturer's instructions (Cat. number DY236). Briefly, supernatants were diluted into the working range of the assay, added to wells coated with a monoclonal mouse anti-human EGF antibody specific for human EGF and incubated for 2 hr. Following a wash step, a polyclonal biotinylated goat anti-human EGF antibody is added and incubated for two hours.

[0531] Following a second wash step, streptavidin-horseradish peroxidase is added and incubated for 20 mins. After an additional wash step, the HRP substrate tetramethylbenzidine and hydrogen peroxide were added and incubated for 20 minutes. A stop solution of sulfuric acid was then added and the absorbance of wells at both 570 nm and 450 nm was measured. After subtracting the absorbance values at 450 nm from those at 570 nm for all the samples, EGF concentrations of the unknowns were calculated against a standard curve constructed from recombinant EGF processed concurrently as above. EGF was measured for all EGF-secreting strains with this method. Dilutions of 1 in 10,000 were made in sample buffer (0.1% BSA in PBS) to bring secreted EGF in the supernatants within the range of this assay.

pEGFR Quantitation

[0532] Phospho-EGFR was measured using a pEGFR HTRF kit specific for Tyr1068 from Cisbio (Cat. 64EG1PEG) as per manufacturer's instructions. Thawed lysates were briefly mixed on a plate shaker and transferred to an opaque 384 well plate. Donor Eu³⁺ cryptate and acceptor d2 pEGFR antibodies were diluted in the provided detection buffer to the working concentration of the assay and combined in equal proportions immediately before use. The antibody mixture was added to each well and incubated for 4h at RT. The FRET signal from each sample was read at 665 nm and 615 n, and the ratio between 665 nm and 615 nm signals was taken.

### Data Analysis and Results

[0533] EcN-EGF total cell counts and viability were obtained using Cellometer K2 Matrix software (Nexelcom, Inc.). All other data were analyzed using Microsoft Excel and GraphPad Prism v9.0. EGF production values (reported in Tables 8-10) were converted from raw concentrations using Equation 1.

$$Equation 1$$

$$Formula for μ g hEGF / 5 \times {10}^{11} cells in 8 hrs conversion$$

$$\frac{μ g hEGF}{5 \times {10}^{11} cells in 8 hrs} = \frac{μ g hEGF}{mL in 8 hrs} \times \frac{5 \times {10}^{11} cells}{2.5 \times {10}^{9} total cells / mL}$$

[0534] Three replicate experiments were performed demonstrating hEGF production in vitro by the EcN-EGF lead prototypes of secreted hEGF (Experiment 1, Experiment 2, and Experiment 3; see FIG. 11B, Tables 24-26). Three subsequent experiments were performed to determine the bioactivity of secreted hEGF by stimulating HT-29 cells using supernatants from the three production experiments (see FIG. 13; Tables 27-29).

TABLE 24
in vitro EGF Production Results (Experiment 1)

| | | | EGF | EGF (μg/ |
|---|---|---|---|---|
| Strain | Strain | Replicate | (μg/mL, | 5 × 10¹¹ |
| ID | Description | Culture | 8 hrs) | cells, 8 hrs) |
| SYN8062 | A-Temp | A | 0.59 | 117.85 |
| | | B | 0.77 | 154.76 |
| | | C | 1.61 | 321.22 |
| SYN8063 | A-FNR | A | 2.03 | 405.75 |
| | | B | 1.98 | 395.11 |
| | | C | 1.88 | 376.16 |
| SYN8065 | B-Temp | A | 0.33 | 65.60 |
| | | B | 0.28 | 55.40 |
| | | C | 0.36 | 71.21 |
| SYN8066 | B-FNR | A | 3.41 | 682.68 |
| | | B | 3.47 | 694.01 |
| | | C | 3.33 | 666.86 |

TABLE 25
in vitro EGF Production Results (Experiment 2)

| | | | EGF | EGF (μg/ |
|---|---|---|---|---|
| Strain | Strain | Replicate | (μg/mL, | 5 × 10¹¹ |
| ID | Description | Culture | 8 hrs) | cells, 8 hrs) |
| SYN8062 | A-Temp | A | 0.71 | 141.81 |
| | | B | 0.92 | 183.96 |
| | | C | 0.93 | 186.41 |
| SYN8063 | A-FNR | A | 2.02 | 404.61 |
| | | B | 2.07 | 414.83 |
| | | C | 1.98 | 395.84 |
| SYN8065 | B-Temp | A | 0.24 | 47.31 |
| | | B | 0.25 | 49.26 |
| | | C | 0.28 | 56.00 |
| SYN8066 | B-FNR | A | 3.04 | 607.85 |
| | | B | 3.36 | 671.32 |
| | | C | 2.86 | 666.21 |

TABLE 26
in vitro EGF Production Results (Experiment 3)

| | | | EGF | EGF (μg/ |
|---|---|---|---|---|
| Strain | Strain | Replicate | (μg/mL, | 5 × 10¹¹ |
| ID | Description | Culture | 8 hrs) | cells, 8 hrs) |
| SYN8062 | A-Temp | A | 0.96 | 192.66 |
| | | B | 1.20 | 239.20 |
| | | C | 1.22 | 244.32 |
| SYN8063 | A-FNR | A | 1.83 | 366.68 |
| | | B | 1.80 | 360.98 |
| | | C | 1.64 | 327.44 |
| SYN8065 | B-Temp | A | 0.52 | 103.79 |
| | | B | 0.49 | 97.09 |
| | | C | 0.28 | 56.92 |
| SYN8066 | B-FNR | A | 2.87 | 574.69 |
| | | B | 2.86 | 571.03 |
| | | C | 3.10 | 619.69 |

TABLE 27
in vitro EGF Bioactivity Results (Supernatants from Experiment 1)

| | EGF | | | | Signal | Plotted |
|---|---|---|---|---|---|---|
| | concen- | Log | 665 | 615 | Ratio | Value |
| | tration | [EGF] | nm | nm | (665 nm/ | (Ratio × |
| Treatment | (nM) | (nM) | Signal | Signal | 615 nm) | 10,000) |
| EGF | 100.00 | 2.00 | 588 | 313 | 1.88 | 18785.94 |
| Standards | 100.00 | 2.00 | 640 | 313 | 2.04 | 20447.28 |
| | 100.00 | 2.00 | 537 | 298 | 1.80 | 18020.13 |
| | 100.00 | 2.00 | 602 | 332 | 1.81 | 18132.53 |
| | 25.00 | 1.40 | 624 | 345 | 1.81 | 18086.96 |
| | 25.00 | 1.40 | 607 | 317 | 1.91 | 19148.26 |
| | 25.00 | 1.40 | 611 | 334 | 1.83 | 18293.41 |
| | 25.00 | 1.40 | 549 | 297 | 1.85 | 18484.85 |
| | 6.25 | 0.80 | 616 | 305 | 2.02 | 20196.72 |
| | 6.25 | 0.80 | 596 | 349 | 1.71 | 17077.36 |
| | 6.25 | 0.80 | 594 | 305 | 1.95 | 19475.41 |
| | 6.25 | 0.80 | 569 | 292 | 1.95 | 19486.30 |
| | 1.56 | 0.19 | 624 | 318 | 1.96 | 19622.64 |
| | 1.56 | 0.19 | 587 | 330 | 1.78 | 17787.88 |
| | 1.56 | 0.19 | 576 | 347 | 1.66 | 16599.42 |
| | 1.56 | 0.19 | 472 | 370 | 1.28 | 12756.76 |
| | 0.39 | −0.41 | 486 | 334 | 1.46 | 14550.90 |
| | 0.39 | −0.41 | 470 | 381 | 1.23 | 12335.96 |
| | 0.39 | −0.41 | 443 | 346 | 1.28 | 12803.47 |
| | 0.39 | −0.41 | 443 | 325 | 1.36 | 13630.77 |
| | 0.10 | −1.01 | 359 | 316 | 1.14 | 11360.76 |
| | 0.10 | −1.01 | 339 | 360 | 0.94 | 9416.67 |
| | 0.10 | −1.01 | 347 | 321 | 1.08 | 10809.97 |
| | 0.10 | −1.01 | 322 | 351 | 0.92 | 9173.79 |
| | 0.00 | — | 263 | 320 | 0.82 | 8218.75 |
| | 0.00 | — | 219 | 293 | 0.75 | 7474.40 |
| | 0.00 | — | 215 | 324 | 0.66 | 6635.80 |
| | 0.00 | — | 255 | 329 | 0.78 | 7750.76 |
| SYN8062 | 25.10 | 1.40 | 546 | 307 | 1.78 | 17785.02 |
| | 25.10 | 1.40 | 494 | 290 | 1.70 | 17034.48 |
| | 25.10 | 1.40 | 542 | 279 | 1.94 | 19426.52 |
| | 25.10 | 1.40 | 535 | 311 | 1.72 | 17202.57 |
| | 6.27 | 0.80 | 605 | 276 | 2.19 | 21920.29 |
| | 6.27 | 0.80 | 523 | 304 | 1.72 | 17203.95 |
| | 6.27 | 0.80 | 554 | 275 | 2.01 | 20145.45 |
| | 6.27 | 0.80 | 574 | 263 | 2.18 | 21825.10 |
| | 1.57 | 0.20 | 546 | 302 | 1.81 | 18079.47 |
| | 1.57 | 0.20 | 494 | 279 | 1.77 | 17706.09 |
| | 1.57 | 0.20 | 558 | 291 | 1.92 | 19175.26 |
| | 1.57 | 0.20 | 510 | 266 | 1.92 | 19172.93 |
| | 0.39 | −0.41 | 394 | 305 | 1.29 | 12918.03 |
| | 0.39 | −0.41 | 347 | 312 | 1.11 | 11121.79 |
| | 0.39 | −0.41 | 422 | 331 | 1.27 | 12749.24 |
| | 0.39 | −0.41 | 391 | 289 | 1.35 | 13529.41 |
| | 0.10 | −1.01 | 307 | 302 | 1.02 | 10165.56 |
| | 0.10 | −1.01 | 331 | 290 | 1.14 | 11413.79 |
| | 0.10 | −1.01 | 323 | 315 | 1.03 | 10253.97 |
| | 0.10 | −1.01 | 327 | 307 | 1.07 | 10651.47 |
| | 0.02 | −1.61 | 295 | 310 | 0.95 | 9516.13 |
| | 0.02 | −1.61 | 227 | 313 | 0.73 | 7252.40 |
| | 0.02 | −1.61 | 283 | 344 | 0.82 | 8226.74 |
| | 0.02 | −1.61 | 275 | 297 | 0.93 | 9259.26 |
| SYN8063 | 31.70 | 1.50 | 610 | 314 | 1.94 | 19426.75 |
| | 31.70 | 1.50 | 594 | 278 | 2.14 | 21366.91 |
| | 31.70 | 1.50 | 638 | 306 | 2.08 | 20849.67 |
| | 31.70 | 1.50 | 570 | 302 | 1.89 | 18874.17 |
| | 7.92 | 0.90 | 618 | 310 | 1.99 | 19935.48 |
| | 7.92 | 0.90 | 598 | 312 | 1.92 | 19166.67 |
| | 7.92 | 0.90 | 614 | 274 | 2.24 | 22408.76 |
| | 7.92 | 0.90 | 651 | 260 | 2.50 | 25038.46 |
| | 1.98 | 0.30 | 630 | 291 | 2.16 | 21649.48 |
| | 1.98 | 0.30 | 672 | 311 | 2.16 | 21607.72 |
| | 1.98 | 0.30 | 603 | 300 | 2.01 | 20100.00 |
| | 1.98 | 0.30 | 582 | 268 | 2.17 | 21716.42 |
| | 0.50 | −0.31 | 494 | 317 | 1.56 | 15583.60 |
| | 0.50 | −0.31 | 470 | 335 | 1.40 | 14029.85 |
| | 0.50 | −0.31 | 474 | 263 | 1.80 | 18022.81 |
| | 0.50 | −0.31 | 442 | 313 | 1.41 | 14121.41 |
| | 0.12 | −0.91 | 347 | 323 | 1.07 | 10743.03 |
| | 0.12 | −0.91 | 311 | 311 | 1.00 | 10000.00 |
| | 0.12 | −0.91 | 355 | 267 | 1.33 | 13295.88 |
| | 0.12 | −0.91 | 339 | 285 | 1.19 | 11894.74 |
| | 0.03 | −1.51 | 290 | 296 | 0.98 | 9797.30 |
| | 0.03 | −1.51 | 295 | 315 | 0.94 | 9365.08 |
| | 0.03 | −1.51 | 279 | 331 | 0.84 | 8429.00 |
| | 0.03 | −1.51 | 255 | 311 | 0.82 | 8199.36 |
| SYN8065 | 5.12 | 0.71 | 534 | 290 | 1.84 | 18413.79 |
| | 5.12 | 0.71 | 518 | 300 | 1.73 | 17266.67 |
| | 5.12 | 0.71 | 526 | 290 | 1.81 | 18137.93 |
| | 5.12 | 0.71 | 518 | 253 | 2.05 | 20474.31 |
| | 1.28 | 0.11 | 486 | 326 | 1.49 | 14907.98 |
| | 1.28 | 0.11 | 502 | 290 | 1.73 | 17310.34 |
| | 1.28 | 0.11 | 542 | 326 | 1.66 | 16625.77 |
| | 1.28 | 0.11 | 506 | 273 | 1.85 | 18534.80 |
| | 0.32 | −0.49 | 386 | 292 | 1.32 | 13219.18 |
| | 0.32 | −0.49 | 375 | 272 | 1.38 | 13786.76 |
| | 0.32 | −0.49 | 414 | 337 | 1.23 | 12284.87 |
| | 0.32 | −0.49 | 375 | 274 | 1.37 | 13686.13 |
| | 0.08 | −1.10 | 331 | 293 | 1.13 | 11296.93 |
| | 0.08 | −1.10 | 307 | 329 | 0.93 | 9331.31 |
| | 0.08 | −1.10 | 299 | 305 | 0.98 | 9803.28 |
| | 0.08 | −1.10 | 299 | 293 | 1.02 | 10204.78 |
| | 0.02 | −1.70 | 303 | 324 | 0.94 | 9351.85 |
| | 0.02 | −1.70 | 263 | 302 | 0.87 | 8708.61 |
| | 0.02 | −1.70 | 255 | 308 | 0.83 | 8279.22 |
| | 0.02 | −1.70 | 251 | 300 | 0.84 | 8366.67 |
| | 0.01 | −2.30 | 247 | 333 | 0.74 | 7417.42 |
| | 0.01 | −2.30 | 239 | 334 | 0.72 | 7155.69 |
| | 0.01 | −2.30 | 259 | 334 | 0.78 | 7754.49 |
| | 0.01 | −2.30 | 247 | 332 | 0.74 | 7439.76 |
| SYN8066 | 53.33 | 1.73 | 630 | 301 | 2.09 | 20930.23 |
| | 53.33 | 1.73 | 606 | 315 | 1.92 | 19238.10 |
| | 53.33 | 1.73 | 597 | 297 | 2.01 | 20101.01 |
| | 53.33 | 1.73 | 614 | 285 | 2.15 | 21543.86 |
| | 13.33 | 1.12 | 645 | 289 | 2.23 | 22318.34 |
| | 13.33 | 1.12 | 594 | 319 | 1.86 | 18620.69 |
| | 13.33 | 1.12 | 602 | 319 | 1.89 | 18871.47 |
| | 13.33 | 1.12 | 594 | 302 | 1.97 | 19668.87 |
| | 3.33 | 0.52 | 674 | 324 | 2.08 | 20802.47 |
| | 3.33 | 0.52 | 566 | 308 | 1.84 | 18376.62 |
| | 3.33 | 0.52 | 602 | 340 | 1.77 | 17705.88 |
| | 3.33 | 0.52 | 638 | 293 | 2.18 | 21774.74 |
| | 0.83 | −0.08 | 566 | 314 | 1.80 | 18025.48 |
| | 0.83 | −0.08 | 538 | 327 | 1.65 | 16452.60 |
| | 0.83 | −0.08 | 522 | 292 | 1.79 | 17876.71 |
| | 0.83 | −0.08 | 522 | 278 | 1.88 | 18776.98 |
| | 0.21 | −0.68 | 438 | 318 | 1.38 | 13773.58 |
| | 0.21 | −0.68 | 435 | 286 | 1.52 | 15209.79 |
| | 0.21 | −0.68 | 438 | 322 | 1.36 | 13602.48 |
| | 0.21 | −0.68 | 410 | 322 | 1.27 | 12732.92 |
| | 0.05 | −1.28 | 315 | 311 | 1.01 | 10128.62 |
| | 0.05 | −1.28 | 310 | 367 | 0.84 | 8446.87 |
| | 0.05 | −1.28 | 354 | 311 | 1.14 | 11382.64 |
| | 0.05 | −1.28 | 303 | 308 | 0.98 | 9837.66 |

TABLE 28
in vitro EGF Bioactivity Results (Supernatants from Experiment 2)

| | EGF | | | | Signal | Plotted |
|---|---|---|---|---|---|---|
| | concen- | Log | 665 | 615 | Ratio | Value |
| | tration | [EGF] | nm | nm | (665 nm/ | (Ratio × |
| Treatment | (nM) | (nM) | Signal | Signal | 615 nm) | 10,000) |
| EGF | 100.00 | 2.00 | 369 | 161 | 2.29 | 22919.25 |
| Standards | 100.00 | 2.00 | 378 | 145 | 2.61 | 26068.97 |
| | 100.00 | 2.00 | 393 | 155 | 2.54 | 25354.84 |
| | 100.00 | 2.00 | 397 | 175 | 2.27 | 22685.71 |
| | 25.00 | 1.40 | 379 | 126 | 3.01 | 30079.37 |
| | 25.00 | 1.40 | 432 | 160 | 2.70 | 27000.00 |
| | 25.00 | 1.40 | 390 | 188 | 2.07 | 20744.68 |
| | 25.00 | 1.40 | 384 | 156 | 2.46 | 24615.38 |
| | 6.25 | 0.80 | 354 | 130 | 2.72 | 27230.77 |
| | 6.25 | 0.80 | 359 | 162 | 2.22 | 22160.49 |
| | 6.25 | 0.80 | 384 | 153 | 2.51 | 25098.04 |
| | 6.25 | 0.80 | 339 | 124 | 2.73 | 27338.71 |
| | 1.56 | 0.19 | 299 | 133 | 2.25 | 22481.20 |
| | 1.56 | 0.19 | 372 | 138 | 2.70 | 26956.52 |
| | 1.56 | 0.19 | 360 | 137 | 2.63 | 26277.37 |
| | 1.56 | 0.19 | 343 | 157 | 2.18 | 21847.13 |
| | 0.39 | −0.41 | 265 | 154 | 1.72 | 17207.79 |
| | 0.39 | −0.41 | 256 | 145 | 1.77 | 17655.17 |
| | 0.39 | −0.41 | 258 | 135 | 1.91 | 19111.11 |
| | 0.39 | −0.41 | 306 | 152 | 2.01 | 20131.58 |
| | 0.10 | −1.01 | 190 | 141 | 1.35 | 13475.18 |
| | 0.10 | −1.01 | 241 | 162 | 1.49 | 14876.54 |
| | 0.10 | −1.01 | 226 | 169 | 1.34 | 13372.78 |
| | 0.10 | −1.01 | 207 | 144 | 1.44 | 14375.00 |
| | 0.02 | −1.61 | 170 | 139 | 1.22 | 12230.22 |
| | 0.02 | −1.61 | 215 | 152 | 1.41 | 14144.74 |
| | 0.02 | −1.61 | 203 | 154 | 1.32 | 13181.82 |
| | 0.02 | −1.61 | 176 | 148 | 1.19 | 11891.89 |
| | 0.00 | — | 165 | 176 | 0.94 | 9375.00 |
| | 0.00 | — | 154 | 145 | 1.06 | 10620.69 |
| | 0.00 | — | 180 | 168 | 1.07 | 10714.29 |
| | 0.00 | — | 165 | 156 | 1.06 | 10576.92 |
| SYN8062 | 11.08 | 1.04 | 341 | 138 | 2.47 | 24710.14 |
| | 11.08 | 1.04 | 340 | 169 | 2.01 | 20118.34 |
| | 11.08 | 1.04 | 356 | 154 | 2.31 | 23116.88 |
| | 11.08 | 1.04 | 359 | 140 | 2.56 | 25642.86 |
| | 2.77 | 0.44 | 340 | 130 | 2.62 | 26153.85 |
| | 2.77 | 0.44 | 348 | 146 | 2.38 | 23835.62 |
| | 2.77 | 0.44 | 351 | 156 | 2.25 | 22500.00 |
| | 2.77 | 0.44 | 343 | 128 | 2.68 | 26796.88 |
| | 0.69 | −0.16 | 276 | 155 | 1.78 | 17806.45 |
| | 0.69 | −0.16 | 288 | 143 | 2.01 | 20139.86 |
| | 0.69 | −0.16 | 291 | 145 | 2.01 | 20068.97 |
| | 0.69 | −0.16 | 311 | 134 | 2.32 | 23208.96 |
| | 0.17 | −0.76 | 224 | 160 | 1.40 | 14000.00 |
| | 0.17 | −0.76 | 218 | 133 | 1.64 | 16390.98 |
| | 0.17 | −0.76 | 213 | 169 | 1.26 | 12603.55 |
| | 0.17 | −0.76 | 233 | 121 | 1.93 | 19256.20 |
| | 0.04 | −1.36 | 175 | 175 | 1.00 | 10000.00 |
| | 0.04 | −1.36 | 182 | 144 | 1.26 | 12638.89 |
| | 0.04 | −1.36 | 188 | 156 | 1.21 | 12051.28 |
| | 0.04 | −1.36 | 166 | 154 | 1.08 | 10779.22 |
| | 0.01 | −1.97 | 159 | 145 | 1.10 | 10965.52 |
| | 0.01 | −1.97 | 194 | 171 | 1.13 | 11345.03 |
| | 0.01 | −1.97 | 163 | 147 | 1.11 | 11088.44 |
| | 0.01 | −1.97 | 177 | 148 | 1.20 | 11959.46 |
| SYN8063 | 31.61 | 1.50 | 356 | 140 | 2.54 | 25428.57 |
| | 31.61 | 1.50 | 353 | 152 | 2.32 | 23223.68 |
| | 31.61 | 1.50 | 359 | 174 | 2.06 | 20632.18 |
| | 31.61 | 1.50 | 332 | 141 | 2.35 | 23546.10 |
| | 7.90 | 0.90 | 345 | 156 | 2.21 | 22115.38 |
| | 7.90 | 0.90 | 355 | 151 | 2.35 | 23509.93 |
| | 7.90 | 0.90 | 373 | 180 | 2.07 | 20722.22 |
| | 7.90 | 0.90 | 345 | 160 | 2.16 | 21562.50 |
| | 1.98 | 0.30 | 375 | 159 | 2.36 | 23584.91 |
| | 1.98 | 0.30 | 345 | 164 | 2.10 | 21036.59 |
| | 1.98 | 0.30 | 368 | 161 | 2.29 | 22857.14 |
| | 1.98 | 0.30 | 326 | 168 | 1.94 | 19404.76 |
| | 0.49 | −0.31 | 304 | 180 | 1.69 | 16888.89 |
| | 0.49 | −0.31 | 288 | 160 | 1.80 | 18000.00 |
| | 0.49 | −0.31 | 329 | 183 | 1.80 | 17978.14 |
| | 0.49 | −0.31 | 301 | 168 | 1.79 | 17916.67 |
| | 0.12 | −0.91 | 220 | 168 | 1.31 | 13095.24 |
| | 0.12 | −0.91 | 226 | 152 | 1.49 | 14868.42 |
| | 0.12 | −0.91 | 208 | 159 | 1.31 | 13081.76 |
| | 0.12 | −0.91 | 246 | 145 | 1.70 | 16965.52 |
| | 0.03 | −1.51 | 213 | 155 | 1.37 | 13741.94 |
| | 0.03 | −1.51 | 206 | 156 | 1.32 | 13205.13 |
| | 0.03 | −1.51 | 210 | 176 | 1.19 | 11931.82 |
| | 0.03 | −1.51 | 218 | 173 | 1.26 | 12601.16 |
| SYN8065 | 3.70 | 0.57 | 301 | 153 | 1.97 | 19673.20 |
| | 3.70 | 0.57 | 382 | 146 | 2.62 | 26164.38 |
| | 3.70 | 0.57 | 361 | 121 | 2.98 | 29834.71 |
| | 3.70 | 0.57 | 386 | 156 | 2.47 | 24743.59 |
| | 0.92 | −0.03 | 342 | 176 | 1.94 | 19431.82 |
| | 0.92 | −0.03 | 329 | 143 | 2.30 | 23006.99 |
| | 0.92 | −0.03 | 325 | 174 | 1.87 | 18678.16 |
| | 0.92 | −0.03 | 321 | 137 | 2.34 | 23430.66 |
| | 0.23 | −0.64 | 262 | 177 | 1.48 | 14802.26 |
| | 0.23 | −0.64 | 207 | 134 | 1.54 | 15447.76 |
| | 0.23 | −0.64 | 221 | 154 | 1.44 | 14350.65 |
| | 0.23 | −0.64 | 238 | 133 | 1.79 | 17894.74 |
| | 0.06 | −1.24 | 243 | 173 | 1.40 | 14046.24 |
| | 0.06 | −1.24 | 175 | 189 | 0.93 | 9259.26 |
| | 0.06 | −1.24 | 230 | 148 | 1.55 | 15540.54 |
| | 0.06 | −1.24 | 207 | 150 | 1.38 | 13800.00 |
| | 0.01 | −1.84 | 201 | 161 | 1.25 | 12484.47 |
| | 0.01 | −1.84 | 195 | 161 | 1.21 | 12111.80 |
| | 0.01 | −1.84 | 191 | 158 | 1.21 | 12088.61 |
| | 0.01 | −1.84 | 207 | 145 | 1.43 | 14275.86 |
| | 0.00 | −2.44 | 162 | 161 | 1.01 | 10062.11 |
| | 0.00 | −2.44 | 179 | 153 | 1.17 | 11699.35 |
| | 0.00 | −2.44 | 211 | 165 | 1.28 | 12787.88 |
| | 0.00 | −2.44 | 158 | 149 | 1.06 | 10604.03 |
| SYN8066 | 47.49 | 1.68 | 366 | 162 | 2.26 | 22592.59 |
| | 47.49 | 1.68 | 374 | 157 | 2.38 | 23821.66 |
| | 47.49 | 1.68 | 391 | 161 | 2.43 | 24285.71 |
| | 47.49 | 1.68 | 373 | 157 | 2.38 | 23757.96 |
| | 11.87 | 1.07 | 343 | 157 | 2.18 | 21847.13 |
| | 11.87 | 1.07 | 366 | 196 | 1.87 | 18673.47 |
| | 11.87 | 1.07 | 382 | 133 | 2.87 | 28721.80 |
| | 11.87 | 1.07 | 350 | 153 | 2.29 | 22875.82 |
| | 2.97 | 0.47 | 345 | 190 | 1.82 | 18157.89 |
| | 2.97 | 0.47 | 358 | 185 | 1.94 | 19351.35 |
| | 2.97 | 0.47 | 439 | 177 | 2.48 | 24802.26 |
| | 2.97 | 0.47 | 366 | 153 | 2.39 | 23921.57 |
| | 0.74 | −0.13 | 323 | 146 | 2.21 | 22123.29 |
| | 0.74 | −0.13 | 325 | 158 | 2.06 | 20569.62 |
| | 0.74 | −0.13 | 350 | 170 | 2.06 | 20588.24 |
| | 0.74 | −0.13 | 358 | 169 | 2.12 | 21183.43 |
| | 0.19 | −0.73 | 239 | 153 | 1.56 | 15620.92 |
| | 0.19 | −0.73 | 258 | 170 | 1.52 | 15176.47 |
| | 0.19 | −0.73 | 247 | 117 | 2.11 | 21111.11 |
| | 0.19 | −0.73 | 253 | 146 | 1.73 | 17328.77 |
| | 0.05 | −1.33 | 230 | 161 | 1.43 | 14285.71 |
| | 0.05 | −1.33 | 243 | 161 | 1.51 | 15093.17 |
| | 0.05 | −1.33 | 215 | 169 | 1.27 | 12721.89 |
| | 0.05 | −1.33 | 195 | 169 | 1.15 | 11538.46 |

TABLE 29
in vitro EGF Bioactivity Results (Supernatants from Experiment 3)

| | EGF | | | | Signal | Plotted |
|---|---|---|---|---|---|---|
| | concen- | Log | 665 | 615 | Ratio | Value |
| | tration | [EGF] | nm | nm | (665 nm/ | (Ratio × |
| Treatment | (nM) | (nM) | Signal | Signal | 615 nm) | 10,000) |
| EGF | 100.00 | 2.00 | 773 | 402 | 1.92 | 19228.86 |
| Standards | 100.00 | 2.00 | 905 | 378 | 2.39 | 23941.80 |
| | 100.00 | 2.00 | 834 | 380 | 2.19 | 21947.37 |
| | 100.00 | 2.00 | 914 | 394 | 2.32 | 23197.97 |
| | 25.00 | 1.40 | 862 | 354 | 2.44 | 24350.28 |
| | 25.00 | 1.40 | 905 | 414 | 2.19 | 21859.90 |
| | 25.00 | 1.40 | 931 | 425 | 2.19 | 21905.88 |
| | 25.00 | 1.40 | 875 | 373 | 2.35 | 23458.45 |
| | 6.25 | 0.80 | 835 | 389 | 2.15 | 21465.30 |
| | 6.25 | 0.80 | 836 | 374 | 2.24 | 22352.94 |
| | 6.25 | 0.80 | 927 | 410 | 2.26 | 22609.76 |
| | 6.25 | 0.80 | 907 | 386 | 2.35 | 23497.41 |
| | 1.56 | 0.19 | 781 | 365 | 2.14 | 21397.26 |
| | 1.56 | 0.19 | 856 | 370 | 2.31 | 23135.14 |
| | 1.56 | 0.19 | 874 | 418 | 2.09 | 20909.09 |
| | 1.56 | 0.19 | 854 | 354 | 2.41 | 24124.29 |
| | 0.39 | −0.41 | 610 | 368 | 1.66 | 16576.09 |
| | 0.39 | −0.41 | 713 | 410 | 1.74 | 17390.24 |
| | 0.39 | −0.41 | 713 | 381 | 1.87 | 18713.91 |
| | 0.39 | −0.41 | 717 | 358 | 2.00 | 20027.93 |
| | 0.10 | −1.01 | 442 | 377 | 1.17 | 11724.14 |
| | 0.10 | −1.01 | 506 | 413 | 1.23 | 12251.82 |
| | 0.10 | −1.01 | 439 | 397 | 1.11 | 11057.93 |
| | 0.10 | −1.01 | 510 | 393 | 1.30 | 12977.10 |
| | 0.02 | −1.61 | 347 | 362 | 0.96 | 9585.64 |
| | 0.02 | −1.61 | 406 | 386 | 1.05 | 10518.13 |
| | 0.02 | −1.61 | 394 | 390 | 1.01 | 10102.56 |
| | 0.02 | −1.61 | 370 | 393 | 0.94 | 9414.76 |
| SYN8062 | 15.05 | 1.18 | 796 | 395 | 2.02 | 20151.90 |
| | 15.05 | 1.18 | 730 | 397 | 1.84 | 18387.91 |
| | 15.05 | 1.18 | 757 | 365 | 2.07 | 20739.73 |
| | 15.05 | 1.18 | 745 | 360 | 2.07 | 20694.44 |
| | 3.76 | 0.58 | 793 | 419 | 1.89 | 18926.01 |
| | 3.76 | 0.58 | 802 | 412 | 1.95 | 19466.02 |
| | 3.76 | 0.58 | 869 | 384 | 2.26 | 22630.21 |
| | 3.76 | 0.58 | 794 | 376 | 2.11 | 21117.02 |
| | 0.94 | −0.03 | 785 | 451 | 1.74 | 17405.76 |
| | 0.94 | −0.03 | 733 | 402 | 1.82 | 18233.83 |
| | 0.94 | −0.03 | 701 | 413 | 1.70 | 16973.37 |
| | 0.94 | −0.03 | 709 | 386 | 1.84 | 18367.88 |
| | 0.24 | −0.63 | 474 | 408 | 1.16 | 11617.65 |
| | 0.24 | −0.63 | 522 | 403 | 1.30 | 12952.85 |
| | 0.24 | −0.63 | 482 | 403 | 1.20 | 11960.30 |
| | 0.24 | −0.63 | 522 | 414 | 1.26 | 12608.70 |
| | 0.06 | −1.23 | 390 | 384 | 1.02 | 10156.25 |
| | 0.06 | −1.23 | 346 | 404 | 0.86 | 8564.36 |
| | 0.06 | −1.23 | 346 | 368 | 0.94 | 9402.17 |
| | 0.06 | −1.23 | 371 | 405 | 0.92 | 9160.49 |
| | 0.01 | −1.83 | 351 | 393 | 0.89 | 8931.30 |
| | 0.01 | −1.83 | 326 | 438 | 0.74 | 7442.92 |
| | 0.01 | −1.83 | 331 | 427 | 0.78 | 7751.76 |
| | 0.01 | −1.83 | 339 | 380 | 0.89 | 8921.05 |
| SYN8063 | 28.65 | 1.46 | 781 | 395 | 1.98 | 19772.15 |
| | 28.65 | 1.46 | 873 | 344 | 2.54 | 25377.91 |
| | 28.65 | 1.46 | 825 | 400 | 2.06 | 20625.00 |
| | 28.65 | 1.46 | 885 | 385 | 2.30 | 22987.01 |
| | 7.16 | 0.86 | 785 | 402 | 1.95 | 19527.36 |
| | 7.16 | 0.86 | 834 | 352 | 2.37 | 23693.18 |
| | 7.16 | 0.86 | 793 | 374 | 2.12 | 21203.21 |
| | 7.16 | 0.86 | 789 | 363 | 2.17 | 21735.54 |
| | 1.79 | 0.25 | 730 | 385 | 1.90 | 18961.04 |
| | 1.79 | 0.25 | 817 | 417 | 1.96 | 19592.33 |
| | 1.79 | 0.25 | 830 | 429 | 1.93 | 19347.32 |
| | 1.79 | 0.25 | 821 | 400 | 2.05 | 20525.00 |
| | 0.45 | −0.35 | 538 | 397 | 1.36 | 13551.64 |
| | 0.45 | −0.35 | 610 | 390 | 1.56 | 15641.03 |
| | 0.45 | −0.35 | 574 | 408 | 1.41 | 14068.63 |
| | 0.45 | −0.35 | 597 | 399 | 1.50 | 14962.41 |
| | 0.11 | −0.95 | 402 | 371 | 1.08 | 10835.58 |
| | 0.11 | −0.95 | 462 | 343 | 1.35 | 13469.39 |
| | 0.11 | −0.95 | 434 | 418 | 1.04 | 10382.78 |
| | 0.11 | −0.95 | 474 | 389 | 1.22 | 12185.09 |
| | 0.03 | −1.55 | 330 | 353 | 0.93 | 9348.44 |
| | 0.03 | −1.55 | 355 | 384 | 0.92 | 9244.79 |
| | 0.03 | −1.55 | 335 | 393 | 0.85 | 8524.17 |
| | 0.03 | −1.55 | 338 | 366 | 0.92 | 9234.97 |
| SYN8065 | 8.11 | 0.91 | 774 | 414 | 1.87 | 18695.65 |
| | 8.11 | 0.91 | 913 | 406 | 2.25 | 22487.68 |
| | 8.11 | 0.91 | 761 | 375 | 2.03 | 20293.33 |
| | 8.11 | 0.91 | 821 | 373 | 2.20 | 22010.72 |
| | 2.03 | 0.31 | 764 | 400 | 1.91 | 19100.00 |
| | 2.03 | 0.31 | 894 | 386 | 2.32 | 23160.62 |
| | 2.03 | 0.31 | 757 | 381 | 1.99 | 19868.77 |
| | 2.03 | 0.31 | 871 | 394 | 2.21 | 22106.60 |
| | 0.51 | −0.30 | 594 | 424 | 1.40 | 14009.43 |
| | 0.51 | −0.30 | 637 | 368 | 1.73 | 17309.78 |
| | 0.51 | −0.30 | 610 | 418 | 1.46 | 14593.30 |
| | 0.51 | −0.30 | 630 | 392 | 1.61 | 16071.43 |
| | 0.13 | −0.90 | 422 | 385 | 1.10 | 10961.04 |
| | 0.13 | −0.90 | 394 | 428 | 0.92 | 9205.61 |
| | 0.13 | −0.90 | 418 | 382 | 1.09 | 10942.41 |
| | 0.13 | −0.90 | 495 | 396 | 1.25 | 12500.00 |
| | 0.03 | −1.50 | 367 | 422 | 0.87 | 8696.68 |
| | 0.03 | −1.50 | 366 | 426 | 0.86 | 8591.55 |
| | 0.03 | −1.50 | 323 | 421 | 0.77 | 7672.21 |
| | 0.03 | −1.50 | 371 | 393 | 0.94 | 9440.20 |
| | 0.01 | −2.10 | 319 | 409 | 0.78 | 7799.51 |
| | 0.01 | −2.10 | 326 | 377 | 0.86 | 8647.21 |
| | 0.01 | −2.10 | 335 | 380 | 0.88 | 8815.79 |
| | 0.01 | −2.10 | 322 | 395 | 0.82 | 8151.90 |
| SYN8066 | 44.90 | 1.65 | 898 | 365 | 2.46 | 24602.74 |
| | 44.90 | 1.65 | 894 | 370 | 2.42 | 24162.16 |
| | 44.90 | 1.65 | 849 | 371 | 2.29 | 22884.10 |
| | 44.90 | 1.65 | 802 | 345 | 2.32 | 23246.38 |
| | 11.22 | 1.05 | 849 | 337 | 2.52 | 25192.88 |
| | 11.22 | 1.05 | 890 | 401 | 2.22 | 22194.51 |
| | 11.22 | 1.05 | 876 | 393 | 2.23 | 22290.08 |
| | 11.22 | 1.05 | 857 | 378 | 2.27 | 22671.96 |
| | 2.81 | 0.45 | 860 | 381 | 2.26 | 22572.18 |
| | 2.81 | 0.45 | 858 | 416 | 2.06 | 20625.00 |
| | 2.81 | 0.45 | 940 | 420 | 2.24 | 22380.95 |
| | 2.81 | 0.45 | 856 | 401 | 2.13 | 21346.63 |
| | 0.70 | −0.15 | 730 | 397 | 1.84 | 18387.91 |
| | 0.70 | −0.15 | 746 | 398 | 1.87 | 18743.72 |
| | 0.70 | −0.15 | 734 | 426 | 1.72 | 17230.05 |
| | 0.70 | −0.15 | 782 | 394 | 1.98 | 19847.72 |
| | 0.18 | −0.76 | 562 | 362 | 1.55 | 15524.86 |
| | 0.18 | −0.76 | 474 | 405 | 1.17 | 11703.70 |
| | 0.18 | −0.76 | 510 | 388 | 1.31 | 13144.33 |
| | 0.18 | −0.76 | 482 | 356 | 1.35 | 13539.33 |
| | 0.04 | −1.36 | 382 | 368 | 1.04 | 10380.43 |
| | 0.04 | −1.36 | 355 | 383 | 0.93 | 9268.93 |
| | 0.04 | −1.36 | 402 | 400 | 1.01 | 10050.00 |
| | 0.04 | −1.36 | 406 | 428 | 0.95 | 9485.98 |

[0535] These data demonstrate that each of the EcN-EGF prototypes (SYN8062, SYN8063, SYN8065, and SYN8066) display in vitro EGF production of ≥1 μg hEGF/5×10\hat{ }11 cells in vitro across three replicate experiments.

[0536] The results of experiments demonstrating the in vitro bioactivity of secreted hEGF in stimulated HT-29 cells are shown in FIG. 13 and Tables 27-29. Overall, these data demonstrate that each of the EcN-EGF prototypes (SYN8062, SYN8063, SYN8065, and SYN8066) are capable of inducing Phospho-EGFR levels comparable to signals observed with recombinant EGF in vitro across three replicate experiments. In all cases, the 95% confidence interval for the EC50 (calculated using GraphPad Prism v9.0 software) intersects this range, indicating that the EC50 estimate is consistent with the expected bioactivity of human EGF.

[0537] In conclusion, the results presented in this study demonstrate that the four EcN-EGF prototypes investigated (SYN8062, SYN8063, SYN8065, and SYN8066) all secretes ≥1 μg hEGF/5e11 cells in vitro across three replicate experiments. Moreover, phospho-EGFR levels measured by ELISA in human epithelial cells induced by secreted hEGF are comparable to signals observed with recombinant EGF (rEGF). Comparability is defined as signal at EC50 values of rEGF (+0.5 log) across three replicate experiments.

### Example 10. In Vivo Biodistribution of Engineered EcN

[0538] The objective of this study was to determine the biodistribution in the gastrointestinal (GI) tract of prototype EGF-secreting strains and to assess the effect of bacterial engineering on GI distribution and fecal excretion of SYN8062 and SYN8063 in C57BL/6J mice using CFU measurements. EcN prototypes used in this study are described in Table 30.

TABLE 30
EcN-EGF Plasmid-Based Prototypes Used in This Study

| | Strain | | EGF | EGF secretion |
|---|---|---|---|---|
| Strain ID | Description | Chassis | promoter | peptide |
| SYN094 | EcN Control | EcN | N/A | N/A |
| SYN8062 | A-Temp | A | cI857 | OmpA |
| SYN8063 | A-FNR | A | FNR | OmpA |

[0539] EcN biomass was prepared in AMBR250 bioreactors and cells were centrifuged at 7,800×g and resuspended in 100 mM phosphate buffer containing 15% glycerol. EcN-EGF aliquots were stored at −80° C. EcN strain biomass used in this study is described in Table 31

TABLE 31
Engineered EcN Strain Biomass Used in this Study

| | | CFU/mL |
|---|---|---|
| Strain ID | Strain Description | (Mean ± SD) |
| SYN094 | Control strain | 6.27E+10 ± 4.04E+09 |
| SYN8062 | A-Temp-OmpA-EGF | 6.80E+10 ± 3.46E+09 |
| SYN8063 | A-FNR-OmpA-EGF | 6.53E+10 ± 4.16E+09 |

### In Vivo Study Design

### In Vivo EcN Fitness and Viability Experimental Design

[0540] A description of the experimental design and treatment groups used to determine in vivo fitness and viability of EcN is provided in Table 32.

TABLE 32
In Vivo EcN Fitness and Viability Experimental Design

| | | | Dosing | StrainDose | | Collection Time |
|---|---|---|---|---|---|---|
| Group | N | Treatment | route | (CFU) | Collection | Points |
| 1 | 25 | Vehicle | PO | 1E+10 | Gut effluents | Gut effluents: 1, 3, 6, |
| 2 | 25 | SYN094 | PO | 1E+10 | (Stomach, SI, | and 24 hrs post-dose |
| 3 | 25 | SYN8062 | PO | 1E+10 | Cecum, Colon | Feces: 1, 3, 6, 24 hrs, |
| 4 | 25 | SYN8063 | PO | 1E+10 | andFeces) | and 24 hrs thereafter |
| | | | | | | until strain is |
| | | | | | | undetectable. |
| | | | | | | N = 5 mice/group/ |
| | | | | | | time point |

### Bioanalytical Methods

### In Vivo Experimental Design for CFU Measurements

[0541] C57BL/6J mice were group housed and assigned to treatment groups. Mice received a single oral dose of the treatment and were sacrificed by CO2 asphyxiation at their assigned time. Feces were collected fresh by free catch, and gut effluents were collected from stomach, small intestine, cecum, and colon by flushing with 500 uL of PBS. Feces and gut effluents were placed into pre-weighed bead-bug tubes containing 500 uL of PBS, weighed, and then processed for serial dilution plating to determine viable colony-forming units (CFUs) immediately after collection.

### Quantitation of Bacterial CFUs in Feces.

[0542] Feces and gut effluents were processed for quantification of bacteria by serial dilution and plating on streptomycin- or thymidine- and kanamycin-containing plates. For serial dilution, 1 mL of PBS was added to each bead-bug tube. The tubes were then homogenized and 150 uL was removed from each tube and plated into Row A of a 96-well conical-bottom plate (12 samples per plate). From Row A, 10 uL of homogenate was removed and placed into each consecutive well in that sample column (eg, taken from Row A1; 10 uL into Row B1, Row C1, Row D1 and so on). A 10-point dilution series was performed, making a 1:10 serial dilution with PBS from the initial 10 uL fecal sample (90 uL of PBS was added). The dilutions were then plated on LB agar plates supplemented with streptomycin (300 ug/mL) or kanamycin (3 mM) and thymidine (3 mM) and incubated overnight at 37° C. Twenty-four hours after the incubation began, plates were removed from the incubator, and colonies were manually counted.

### Data Analysis and Results

[0543] EcN total cell counts and viability were obtained using Cellometer K2 Matrix software (Nexelcom, Inc.). Raw data were entered in Microsoft excel (Microsoft Excel, Seattle, WA) spreadsheet and transferred to GraphPad Prism v9.0 (GraphPad Software, San Diego, CA). Statistical analysis was performed using GraphPad Prism, and the specific tests used are indicated in the legend to each respective figure. Significance was set as p<0.05.

[0544] To determine in vivo viability and gut transit of chassis A EcN expressing EGF, two strains were and compared to wildtype EcN. Mice received a single oral bolus of EcN WT (SYN094), A-PcI857-EGF (SYN8062), A-PfnrS-EGF (SYN8063) at 1×10¹⁰ CFU. FIG. 15 shows abundance in effluents that were collected and counted at indicated times from the small intestine, cecum, colon, and feces. The tabular CFU counts used for construction of these charts are included in Table 33 and Table 34. In the effluents obtained from the small intestine, cecum, and colon of mice dosed with either SYN094 (control), SYN8062 or SYN8063, no substantial difference was observed in the survival or GI distribution over the duration of the study. No significant difference in fecal recovery was observed between the three strains at all time points.

TABLE 33
Tabular Results Supporting Bacterial Strain Effluent Recovery

| Gut | | Time of collection (hours) | | | |
|---|---|---|---|---|---|
| segment | Strain | 1 | 3 | 6 | 24 |
| Small | SYN094 | 3.0 × 10⁹ ± 1.7 × 10⁹ | 6.5 × 10⁶ ± 5.1 × 10⁶ | 6.0 × 10⁵ ± 3.5 × 10⁵ | 1.4 × 10⁴ ± 1.0 × 10⁴ |
| intestine | SYN8062 | 2.3 × 10⁹ ± 8.5 × 10⁸ | 7.7 × 10⁵ ± 3.3 × 10⁵ | 2.3 × 10⁷ ± 1.1 × 10⁷ | 2.1 × 10⁴ ± 7.9 × 10³ |
| | SYN8063 | 1.2 × 10⁹ ± 6.0 × 10⁸ | 1.6 × 10⁶ ± 7.1 × 10⁵ | 5.3 × 10⁵ ± 3.8 × 10⁵ | 9.3 × 10⁴ ± 6.9 × 10⁴ |
| Cecum | SYN094 | 1.5 × 10⁹ ± 6.1 × 10⁸ | 2.3 × 10⁹ ± 4.4 × 10⁸ | 6.1 × 10⁸ ± 1.2 × 10⁸ | 1.1 × 10⁵ ± 3.3 × 10⁴ |
| | SYN8062 | 6.0 × 10⁹ ± 7.4 × 10⁸ | 3.6 × 10⁹ ± 1.6 × 10⁸ | 5.5 × 10⁸ ± 1.6 × 10⁸ | 2.1 × 10⁵ ± 8.2 × 10⁴ |
| | SYN8063 | 2.2 × 10⁹ ± 1.0 × 10⁹ | 3.0 × 10⁹ ± 9.3 × 10⁸ | 2.4 × 10⁸ ± 5.6 × 10⁷ | 3.1 × 10⁷ ± 3.0 × 10⁷ |
| Colon | SYN094 | 4.5 × 10⁸ ± 4.0 × 10⁸ | 5.5 × 10⁹ ± 1.8 × 10⁹ | 5.0 × 10⁹ ± 2.6 × 10⁹ | 2.4 × 10⁵ ± 6.7 × 10⁴ |
| | SYN8062 | 2.7 × 10⁹ ± 1.1 × 10⁹ | 1.2 × 10¹⁰ ± 2.1 × 10⁹ | 5.0 × 10⁹ ± 2.4 × 10⁹ | 5.2 × 10⁵ ± 3.1 × 10⁵ |
| | SYN8063 | 2.5 × 10⁹ ± 1.4 × 10⁹ | 5.0 × 10⁹ ± 1.3 × 10⁹ | 1.0 × 10⁹ ± 3.7 × 10⁸ | 6.3 × 10⁷ ± 6.0 × 10⁷ |

N = 5 mice per group per time point.

TABLE 34
Tabular Results Supporting Bacterial Strain Fecal Recovery

| Fecal | | | |
|---|---|---|---|
| collection | | | |
| time (hours) | SYN094 | SYN8062 | SYN8063 |
| 1 | 5.2 × 10⁵ ± | N/D | N/D |
| | 5.2 × 10⁵ | | |
| 3 | 1.1 × 10⁹ ± | 1.5 × 10⁹ ± | 5.0 × 10⁹ ± |
| | 5.9 × 10⁸ | 7.8 × 10⁸ | 1.8 × 10⁹ |
| 6 | 4.8 × 10⁸ ± | 8.7 × 10⁸ ± | 1.1 × 10⁹ ± |
| | 3.2 × 10⁸ | 2.3 × 10⁸ | 2.3 × 10⁸ |
| 24 | 3.1 × 10⁵ ± | 4.6 × 10⁴ ± | 1.2 × 10⁵ ± |
| | 2.9 × 10⁵ | 3.1 × 10⁴ | 5.1 × 10⁴ |
| 48 | 1.1 × 10³ ± | 2.7 × 10³ ± | 1.6 × 10³ ± |
| | 6.1 × 10² | 1.3 × 10³ | 1.0 × 10³ |
| 72 | N/D | N/D | N/D |

N = 5 mice per group per time point, except for 24 h time point SYN094, SYN8063 n = 4 per group

[0545] The results in this study demonstrate the biodistribution of engineered EcN. EcN-EGF prototypes (SYN8062, SYN8063) in chassis A follow the same CFU kinetics as EcN WT strain (SYN094). EcN rapidly clears SI and is abundant in distal gut up to 6 hrs post dose. Data suggests no significant effect of modifications on transit.

### Example 11. In Vivo EGF Secretion by Prototype Strains in Naïve Mice

[0546] The objective of this study was to determine the ability of prototype EGF-secreting strains to produce EGF in the GI tract. C57BL/6J mice (female, n=5) were group housed and assigned to treatment groups. Mice received a single oral dose of bacterial cells (1e10) and were sacrificed by CO2 asphyxiation at 1, 3, 6 or 24 hours. Effluents (small intestine, cecum, colon) were collected as described above in Example 10. ELISA for EGF was performed per manufacturer's instructions (Invitrogen). Preliminary results are shown in FIG. 16. High levels of hEGF were detected in small intestine (SI) and cecum at 1 hr post-dose and in colon 3 hr post-dose. At 6 hours post dose, these quantities dropped to nanogram levels.

### Example 12. In Vivo Biodistribution and EGF Secretion of Engineered EcN in a DSS Model

[0547] Two studies were conducted to determine (1) the biodistribution in the gastrointestinal (GI) tract of prototype EGF-secreting strains and (2) the ability of the strains to produce and secrete EGF in the various GI compartments over time in a DDS model of IBD. EcN prototypes used in these studies are SYN8066 (Chassis B, FNR) and SYN8248 (Chassis B).

[0548] In both studies, female mice were randomized into different treatment groups (n=5) by weight and put on 3% DSS drinking water for 7 days. After day 6, DSS water was removed and substituted with normal water. On day 7, mice (female, N=5) received a single oral dose of the treatment (1e10 cells) and were sacrificed by CO2 asphyxiation at 1, 3, 6 or 24 hours and effluents were collected as described in Example 10 above.

[0549] For the biodistribution study, bacteria were quantitated as described above in Example 10. Results are shown in FIG. 17. No substantial difference was observed in the survival or GI distribution over the duration of the study between the EGF secreting strain SYN8066 and the chassis B only strain SYN8248. Data suggests no significant effect of modifications on transit. In the DSS model, EcN cleared the small intestine and was abundant in distal gut up to 24 hrs post dose, which is substantially longer than in naïve mice, where much lower bacterial levels were observed at the 24-hour timepoint. These results demonstrate that the biodistribution of engineered EcN in the gastrointestinal tract in the DSS model differs from the biodistribution in naïve mice, in that transit through the lower intestine is delayed in DSS mice as compared to naïve mice.

[0550] To assess secretion levels in the gastrointestinal tract, mice (female, n=5) were treated with DSS as described above and on day 8 received a single oral dose of bacteria (leO cells). Mice were sacrificed at the 1-, 3-, or 6-hour time points, and effluents were collected for measurement of EFG secretion by ELISA. Results are shown in FIG. 18. In this initial study, similar levels of hEGF were produced in DSS colitis mice as observed previously in healthy mice (˜30 ng in colon at 3h post-dose and ˜10 ng at 6h post-dose).

### Example 13. Construction of Integrated Strains

[0551] Strains having 1-, 2-, and 3-copies of integrated FNR-EGF in a chassis B background were generated. Integrated strains are listed in Table 35.

[0552] To determine the EGF production capability of the integrated strains EcN-EGF cells were added to 30 mL media to obtain a final concentration of 2.5×10\hat{ }9 total cells/mL. Resuspended EcN-EGF cultures were then split into three 10 mL aliquots in 50 mL flasks and incubated at 37° C. under atmospheric conditions in a shaking incubator at 250 rpm for 8 hrs. EGF-containing supernatants were then collected by centrifuging cultures at 4,000 rpm for 10 mins in a benchtop hanging bucket centrifuge. Supernatant samples were frozen and stored at −80° C. until EGF quantitation by ELISA. Results show that 2-3 copy integrated strains show favorable in vitro activity compared to plasmid-based B-FNR (SYN8066) (FIG. 19).

TABLE 35
Integrated strains

| Strain | |
|---|---|
| number | Description |
| SYN8371 | Single copy integration of fnr_ompA_EGF into |
| | SYN8064 (Chassis B (no DOM mutation)). Strain |
| | has: ΔthyA, ΔclbKO, ΔΦ. |
| SYN8409 | Double copy integration of fnr_ompA_EGF |
| | attB7 and attB5 sites of SYN8064 (Chassis B). |
| | (Chassis (no DOM mutation)). Strain has: |
| | ΔthyA, ΔclbKO, ΔΦ |
| SYN8510 | Three copy integration of fnr_ompA_EGF attB2, |
| | attB7 and attB5 sites of SYN8064 (Chassis B). |
| | (Chassis B (no DOM mutation)). Strain has: |
| | ΔthyA, ΔclbKO, ΔΦ |

1. A recombinant bacterium comprising a polynucleotide sequence encoding a EGF polypeptide fused to a secretion tag, wherein the polynucleotide sequence is operably linked to an FNR-inducible promoter or temperature-sensitive promoter.

2. The recombinant bacterium of claim 1, wherein the secretion tag is any of PhoA, PelB, OmpA, LARD3, or HylA.

3. The recombinant bacterium of claim 1 or 2, wherein the EGF polypeptide comprises at least 80%, 85%, 90%, 95%, 96%, 97%, 98%, or 99% identity to Sequence A or a functional fragment thereof.

4. The recombinant bacterium of any one of claims 1-3, wherein the EGF polypeptide comprises Sequence A or a functional fragment thereof.

5. The recombinant bacterium of any one of claims 2-4, wherein the PhoA secretion tag polypeptide comprises at least 80%, 85%, 90%, 95%, 96%, 97%, 98%, or 99% identity to Sequence D.

6. The recombinant bacterium of claim 5, wherein the PhoA secretion tag polypeptide comprises Sequence D.

7. The recombinant bacterium of any one of claims 2-4, wherein the PelB secretion tag polypeptide comprises at least 80%, 85%, 90%, 95%, 96%, 97%, 98%, or 99% identity to Sequence C.

8. The recombinant bacterium of claim 7, wherein the PelB secretion tag polypeptide comprises Sequence C.

9. The recombinant bacterium of any one of claims 2-4, wherein the OmpA secretion tag polypeptide comprises at least 80%, 85%, 90%, 95%, 96%, 97%, 98%, or 99% identity to Sequence E.

10. The recombinant bacterium of claim 9, wherein the OmpA secretion tag polypeptide comprises Sequence E.

11. The recombinant bacterium of any one of claims 2-4, wherein the LARD3 secretion tag polypeptide comprises at least 80%, 85%, 90%, 95%, 96%, 97%, 98%, or 99% identity to Sequence F.

12. The recombinant bacterium of claim 11, wherein the LARD3 secretion tag polypeptide comprises Sequence F.

13. The recombinant bacterium of any one of claims 2-4, wherein the HylA secretion tag polypeptide comprises at least 80%, 85%, 90%, 95%, 96%, 97%, 98%, or 99% identity to Sequence G.

14. The recombinant bacterium of claim 13, wherein the HylA secretion tag polypeptide comprises Sequence G.

15. The recombinant bacterium of any one of claims 1-14, comprising a low oxygen-inducible promoter.

16. The recombinant bacterium of any one of claims 1-14, comprising a temperature-sensitive inducible promoter.

17. The recombinant bacterium of claim 15, wherein the low oxygen-inducible promoter comprises at least 80%, 85%, 90%, 95%, 96%, 97%, 98%, or 99% identity to any one of SEQ ID NOs: 151-167.

18. The recombinant bacterium of claim 17, wherein the low oxygen-inducible promoter comprises any one of SEQ ID NOs: 151-167.

19. The recombinant bacterium of claim 16, wherein the temperature-sensitive promoter is a pR promoter and further comprises a CI857 repressor.

20. The recombinant bacterium of claim 19, wherein the CI857 repressor-pR promoter comprises at least 80%, 85%, 90%, 95%, 96%, 97%, 98%, or 99% identity to any one of SEQ ID NOs: 183-185.

21. The recombinant bacterium of claim 20, wherein the CI857 repressor-pR promoter comprises any one of SEQ ID NOs: 183-185.

22. The recombinant bacterium of any one of claims 1-21, wherein the EGF fusion polypeptide comprises at least 80%, 85%, 90%, 95%, 96%, 97%, 98%, or 99% identity to Sequences H, I, J, K, or L, or the EGF fusion polynucleotide comprises at least 80%, 85%, 90%, 95%, 96%, 97%, 98%, or 99% identity to Sequences N, O, P, Q, R, Y, Z, AA, AB, AC, AD, AE, or AF.

23. The recombinant bacterium of any one of claims 1-21, wherein the EGF fusion polypeptide comprises Sequences H, I, J, K, or L, or the EGF fusion polynucleotide comprises Sequences N, O, P, Q, R, Y, Z, AA, AB, AC, AD, AE, or AF.

24. The recombinant bacterium of any one of claims 1-23, comprising a gene sequence encoding a polypeptide linker and/or a stabilizing polypeptide.

25. The recombinant bacterium of claim 24, wherein the secretion tag is linked to the N terminus of EGF via a peptide bond or a polypeptide linker.

26. The recombinant bacterium of claim 24, wherein the secretion tag is linked to the C terminus of EGF via a peptide bond or a polypeptide linker.

27. The recombinant bacterium of any one of claims 1-26, wherein the secretion tag is cleaved after secretion of EGF into the extracellular environment.

28. The recombinant bacterium of claims 1-27, wherein the bacterium is selected from the group consisting of Bacteroides, Bifidobacterium, Clostridium, Escherichia, Lactobacillus, and Lactococcus.

29. The recombinant bacterium of claims 1-28, wherein the bacterium is selected from Clostridium novyi NT, Clostridium butyricum, and Bifidobacterium longum.

30. The recombinant bacterium of claim any of claims 1-29, wherein the bacterium is Escherichia coli strain Nissle.

31. The recombinant bacterium of claims 1-30, wherein the bacterium has a mutated gene encoding a periplasmic protein pal and expresses the EGF fusion polypeptide.

32. The recombinant bacterium of claims 1-30, wherein the bacterium has a Type 1 secretion system and expresses the EGF fusion polypeptide.

33. The recombinant bacterium of any one of claims 1-32, wherein the bacterium is capable of secreting about 0.1, 0.2, 0.3, 0.4, 0.5, 0.6, 0.7, 0.8, 0.9, or 1.0 ug EGF/5e11 cells over 4 hours under inducing conditions.

34. The recombinant bacterium of any one of claims 1-32, wherein the bacterium is capable of secreting about 1, 1.5, 2, 2.5, 3, 3.5, 4, 4.5, 5, 5.5, 6, 6.5, 7, 7.5, 8, 8.5, 9, 9.5, or 10 ug EGF/5e11 cells over 4 hours under inducing conditions.

35. The recombinant bacterium of any one of claims 1-32, wherein the bacterium is capable of secreting about 10, 20, 30, 40, 50, 60, 70, 80, 90, 100, 110, or 120 ug EGF/5e11 cells over 4 hours under inducing conditions.

36. The recombinant bacterium of any one of claims 1-32, wherein the bacterium is capable of secreting at least about 110, 120, 130, 140, 150, 160, 170, 180, 190, or 200 μg EGF/5e11 cells over 4 hours under inducing conditions.

37. The recombinant bacterium of any one of claims 1-32, wherein the bacterium is capable of secreting at least about 210, 220, 230, 240, 250, 260, 270, 280, 290, or 300 μg EGF/5e11 cells over 4 hours under inducing conditions.

38. The recombinant bacterium of any one of claims 1-32, wherein the bacterium is capable of secreting at least about 350, 400, 450, 500, 550, 600, 650, 700, 750, or 800 μg EGF/5e11 cells over 4 hours under inducing conditions.

39. The recombinant bacterium of any one of claims 1-32, wherein the bacterium is capable of secreting about 0.1, 0.2, 0.3, 0.4, 0.5, 0.6, 0.7, 0.8, 0.9, or 1.0 ug EGF/5e11 cells over 8 hours under inducing conditions.

40. The recombinant bacterium of any one of claims 1-32, wherein the bacterium is capable of secreting about 1, 1.5, 2, 2.5, 3, 3.5, 4, 4.5, 5, 5.5, 6, 6.5, 7, 7.5, 8, 8.5, 9, 9.5, or 10 ug EGF/5e11 cells over 8 hours under inducing conditions.

41. The recombinant bacterium of any one of claims 1-32, wherein the bacterium is capable of secreting about 10, 20, 30, 40, 50, 60, 70, 80, 90, 100, 110, or 120 ug/mL EGF/5e11 cells over 8 hours under inducing conditions.

42. The recombinant bacterium of any one of claims 1-32, wherein the bacterium is capable of secreting at least about 40, 50, 60, 70, 80, 90, or 100 μg EGF/5e11 cells over 8 hours under inducing conditions.

43. The recombinant bacterium of any one of claims 1-32, wherein the bacterium is capable of secreting at least about 110, 120, 130, 140, 150, 160, 170, 180, 190, or 200 μg EGF/5e11 cells over 8 hours under inducing conditions.

44. The recombinant bacterium of any one of claims 1-32, wherein the bacterium is capable of secreting at least about 210, 220, 230, 240, 250, 260, 270, 280, 290, or 300 μg EGF/5e11 cells over 8 hours under inducing conditions.

45. The recombinant bacterium of any one of claims 1-32, wherein the bacterium is capable of secreting at least about 350, 400, 450, 500, 550, 600, 650, or 700, 750, or 800 μg EGF/5e11 cells over 8 hours under inducing conditions.

46. The bacterium of any one of claims 33-45, wherein the inducing conditions are low oxygen or anaerobic conditions.

47. The bacterium of any one of claims 33-45, wherein the inducing conditions are a temperature between about 37° C. and about 42° C.

48. The recombinant bacterium of any one of claims 1-47, wherein the recombinant bacterium comprises a deletion in the pks island.

49. A pharmaceutical composition comprising the bacterium of any one of claims 1-48.

50. A method of treating a disorder comprising the step of administering to a patient in need thereof the bacterium of any one of claims 1-48 or the composition of claim 49.

51. The method of claim 50, wherein the disorder is selected from a group consisting of autoimmune disorders, cancer, metabolic diseases, diseases relating to inborn errors of metabolism, and neurological or neurodegenerative diseases.

52. The method of claim 51, wherein the autoimmune disorder is selected from the group consisting of acute disseminated encephalomyelitis (ADEM), acute necrotizing hemorrhagic leukoencephalitis, Addison's disease, agammaglobulinemia, alopecia areata, amyloidosis, ankylosing spondylitis, anti-GBM/anti-TBM nephritis, antiphospholipid syndrome (APS), autoimmune angioedema, autoimmune aplastic anemia, autoimmune dysautonomia, autoimmune hemolytic anemia, autoimmune hepatitis, autoimmune hyperlipidemia, autoimmune immunodeficiency, autoimmune inner ear disease (AIED), autoimmune myocarditis, autoimmune oophoritis, autoimmune pancreatitis, autoimmune retinopathy, autoimmune thrombocytopenic purpura (ATP), autoimmune thyroid disease, autoimmune urticarial, Axonal & neuronal neuropathies, Balo disease, Behcet's disease, Bullous pemphigoid, Cardiomyopathy, Castleman disease, Celiac disease, Chagas disease, Chronic inflammatory demyelinating polyneuropathy (CIDP), Chronic recurrent multifocal ostomyelitis (CRMO), Churg-Strauss syndrome, Cicatricial pemphigoid/benign mucosal pemphigoid, Crohn's disease, Cogan syndrome, Cold agglutinin disease, Congenital heart block, Coxsackie myocarditis, CREST disease, Essential mixed cryoglobulinemia, Demyelinating neuropathies, Dermatitis herpetiformis, Dermatomyositis, Devic's disease (neuromyelitis optica), Discoid lupus, Dressler's syndrome, Endometriosis, Eosinophilic esophagitis, Eosinophilic fasciitis, Erythema nodosum, Experimental allergic encephalomyelitis, Evans syndrome, Fibrosing alveolitis, Giant cell arteritis (temporal arteritis), Giant cell myocarditis, Glomerulonephritis, Goodpasture's syndrome, Granulomatosis with Polyangiitis (GPA), Graves' disease, Guillain-Barre syndrome, Hashimoto's encephalitis, Hashimoto's thyroiditis, Hemolytic anemia, Henoch-Schonlein purpura, Herpes gestationis, Hypogammaglobulinemia, Idiopathic thrombocytopenic purpura (ITP), IgA nephropathy, IgG4-related sclerosing disease, Immunoregulatory lipoproteins, Inclusion body myositis, Interstitial cystitis, Juvenile arthritis, Juvenile idiopathic arthritis, Juvenile myositis, Kawasaki syndrome, Lambert-Eaton syndrome, Leukocytoclastic vasculitis, Lichen planus, Lichen sclerosus, Ligneous conjunctivitis, Linear IgA disease (LAD), Lupus (Systemic Lupus Erythematosus), chronic Lyme disease, Meniere's disease, Microscopic polyangiitis, Mixed connective tissue disease (MCTD), Mooren's ulcer, Mucha-Habermann disease, Multiple sclerosis, Myasthenia gravis, Myositis, Narcolepsy, Neuromyelitis optica (Devic's), Neutropenia, Ocular cicatricial pemphigoid, Optic neuritis, Palindromic rheumatism, PANDAS (Pediatric autoimmune Neuropsychiatric Disorders Associated with Streptococcus), Paraneoplastic cerebellar degeneration, Paroxysmal nocturnal hemoglobinuria (PNH), Parry Romberg syndrome, Parsonnage-Turner syndrome, Pars planitis (peripheral uveitis), Pemphigus, Peripheral neuropathy, Perivenous encephalomyelitis, Pernicious anemia, POEMS syndrome, Polyarteritis nodosa, Type I, II, & III autoimmune polyglandular syndromes, Polymyalgia rheumatic, Polymyositis, Postmyocardial infarction syndrome, Postpericardiotomy syndrome, Progesterone dermatitis, Primary biliary cirrhosis, Primary sclerosing cholangitis, Psoriasis, Psoriatic arthritis, Idiopathic pulmonary fibrosis, Pyoderma gangrenosum, Pure red cell aplasia, Raynauds phenomenon, reactive arthritis, reflex sympathetic dystrophy, Reiter's syndrome, relapsing polychondritis, restless legs syndrome, retroperitoneal fibrosis, rheumatic fever, rheumatoid arthritis, sarcoidosis, Schmidt syndrome, scleritis, scleroderma, Sjogren's syndrome, sperm & testicular autoimmunity, stiff person syndrome, subacute bacterial endocarditis (SBE), Susac's syndrome, sympathetic ophthalmia, Takayasu's arteritis, temporal arteritis/giant cell arteritis, thrombocytopenic purpura (TTP), Tolosa-Hunt syndrome, transverse myelitis, type 1 diabetes, asthma, ulcerative colitis, undifferentiated connective tissue disease (UCTD), uveitis, vasculitis, vesiculobullous dermatosis, vitiligo, and Wegener's granulomatosis.

53. The method of claim 51, wherein the cancer is selected from adrenal cancer, adrenocortical carcinoma, anal cancer, appendix cancer, bile duct cancer, bladder cancer, bone cancer (e.g., Ewing sarcoma tumors, osteosarcoma, malignant fibrous histiocytoma), brain cancer (e.g., astrocytomas, brain stem glioma, craniopharyngioma, ependymoma), bronchial tumors, central nervous system tumors, breast cancer, Castleman disease, cervical cancer, colon cancer, rectal cancer, colorectal cancer, endometrial cancer, esophageal cancer, eye cancer, gallbladder cancer, gastrointestinal cancer, gastrointestinal carcinoid tumors, gastrointestinal stromal tumors, gestational trophoblastic disease, heart cancer, Kaposi sarcoma, kidney cancer, largyngeal cancer, hypopharyngeal cancer, leukemia (e.g., acute lymphoblastic leukemia, acute myeloid leukemia, chronic lymphocytic leukemia, chronic myelogenous leukemia), liver cancer, lung cancer, lymphoma (e.g., AIDS-related lymphoma, Burkitt lymphoma, cutaneous T cell lymphoma, Hogkin lymphoma, Non-Hogkin lymphoma, primary central nervous system lymphoma), malignant mesothelioma, multiple myeloma, myelodysplastic syndrome, nasal cavity cancer, paranasal sinus cancer, nasopharyngeal cancer, neuroblastoma, oral cavity cancer, oropharyngeal cancer, osteosarcoma, ovarian cancer, pancreatic cancer, penile cancer, pituitary tumors, prostate cancer, retinoblastoma, rhabdomyosarcoma, rhabdoid tumor, salivary gland cancer, sarcoma, skin cancer (e.g., basal cell carcinoma, melanoma), small intestine cancer, stomach cancer, teratoid tumor, testicular cancer, throat cancer, thymus cancer, thyroid cancer, unusual childhood cancers, urethral cancer, uterine cancer, uterine sarcoma, vaginal cancer, vulvar cancer, Waldenström macrogloblulinemia, and Wilms tumor.

54. The method of claim 51, wherein the metabolic disorder or condition is selected from the group consisting of: type 1 diabetes; type 2 diabetes; metabolic syndrome; Bardet-Biedel syndrome; Prader-Willi syndrome; non-alcoholic fatty liver disease; tuberous sclerosis; Albright hereditary osteodystrophy; brain-derived neurotrophic factor (BDNF) deficiency; Single-minded 1 (SIM1) deficiency; leptin deficiency; leptin receptor deficiency; pro-opiomelanocortin (POMC) defects; proprotein convertase subtilisin/kexin type 1 (PCSK1) deficiency; Src homology 2B1 (SH2B1) deficiency; pro-hormone convertase 1/3 deficiency; melanocortin-4-receptor (MC4R) deficiency; Wilms tumor, aniridia, genitourinary anomalies, and mental retardation (WAGR) syndrome; pseudohypoparathyroidism type 1A; Fragile X syndrome; Borjeson-Forsmann-Lehmann syndrome; Alstrom syndrome; Cohen syndrome; and ulnar-mammary syndrome.

The application's sequence listing, which the Patent Office published only in electronic form, follows.

SEQUENCE LISTING (1291 sequences)

SEQ ID NO: 1-140 - skipped (140 entries)

SEQ ID NO: 141 - DNA, 483 bp, Homo sapiens
atgagccccggacagggaactcaaagcgagaacagctgcacacattttccaggtaatcttccaaatatgcttcgtgacttgcgtgacgctttctctcgcgtgaaaaccttttttcagatgaaggatcagttagataatctgctgctgaaagaatcgcttcttgaggacttcaagggatatctgggatgtcaggcgttatctgagatgattcagttttatttggaagaagttatgccccaggctgagaatcaagaccctgacatcaaagcgcatgtgaatagcctgggcgagaatctgaagacactgcgcctgcgtcttcgccgctgtcaccgttttctgccttgcgaaaataagagtaaggccgttgagcaagtgaaaaatgctttcaacaagttacaagaaaaagggatttacaaagctatgtctgagtttgacattttcattaattacattgaggcctacatgactatgaagattcgcaat

SEQ ID NO: 142 - protein, 8 aa, Artificial Sequence
  Description of Artificial Sequence: Synthetic peptide
GGGSGGGS

SEQ ID NO: 143 - protein, 327 aa, Artificial Sequence
  Description of Artificial Sequence: Synthetic polypeptide
SPGQGTQSENSCTHFPGNLPNMLRDLRDAFSRVKTFFQMKDQLDNLLLKESLLEDFKGYLGCQALSEMIQFYLEEVMPQAENQDPDIKAHVNSLGENLKTLRLRLRRCHRFLPCENKSKAVEQVKNAFNKLQEKGIYKAMSEFDIFINYIEAYMTMKIRNGGGSGGGSPGQGTQSENSCTHFPGNLPNMLRDLRDAFSRVKTFFQMKDQLDNLLLKESLLEDFKGYLGCQALSEMIQFYLEEVMPQAENQDPDIKAHVNSLGENLKTLRLRLRRCHRFLPCENKSKAVEQVKNAFNKLQEKGIYKAMSEFDIFINYIEAYMTMKIRN

SEQ ID NO: 144 - protein, 134 aa, Homo sapiens
MAPTSSSTKKTQLQLEHLLLDLQMILNGINNYKNPKLTRMLTFKFYMPKKATELKHLQCLEEELKPLEEVLNLAQSKNFHLRPRDLISNINVIVLELKGSETTFMCEYADETATIVEFLNRWITFCQSIISTLT

SEQ ID NO: 145 - protein, 179 aa, Homo sapiens
MAALQKSVSSFLMGTLATSCLLLLALLVQGGAAAPISSHCRLDKSNFQQPYITNRTFMLAKEASLADNNTDVRLIGEKLFHGVSMSERCYLMKQVLNFTLEEVLFPQSDRFQPYMQEVVPFLARLSNRLSTCHIEGDDLHIQRNVQKLKDTVKKLGESGEIKAIGELDLLFMSLRNACI

SEQ ID NO: 146 - protein, 243 aa, Homo sapiens
MGQTAGDLGWRLSLLLLPLLLVQAGVWGFPRPPGRPQLSLQELRREFTVSLHLARKLLSEVRGQAHRFAESHLPGVNLYLLPLGEQLPDVSLTFQAWRRLSDPERLCFISTTLQPFHALLGGLGTQGRWTNMERMQLWAMRLDLRDLQRHLRFQVLAAGFNLPEEEEEEEEEEEEERKGLLPGALGSALQGPAQVSWPQLLSTYRLLHSLELVLSRAVRELLLLSKAGHSVWPLGFPTLSPQP

SEQ ID NO: 147 - protein, 154 aa, Artificial Sequence [sequence omitted]

SEQ ID NO: 148 - protein, 33 aa, Homo sapiens
HADGSFSDEMNTILDNLAARDFINWLIQTKITD

SEQ ID NO: 149 - protein, 33 aa, Artificial Sequence
  Description of Artificial Sequence: Synthetic polypeptide
HGDGSFSDEMNTILDNLAARDFINWLIQTKITD

SEQ ID NO: 150 - skipped

SEQ ID NO: 151 - DNA, 290 bp, Artificial Sequence
  Description of Artificial Sequence: Synthetic polynucleotide
gtcagcataacaccctgacctctcattaattgttcatgccgggcggcactatcgtcgtccggccttttcctctcttactctgctacgtacatctatttctataaatccgttcaatttgtctgttttttgcacaaacatgaaatatcagacaattccgtgacttaagaaaatttatacaaatcagcaatataccccttaaggagtatataaaggtgaatttgatttacatcaataagcggggttgctgaatcgttaaggtaggcggtaatagaaaagaaatcgaggcaaaa

SEQ ID NO: 152 - DNA, 173 bp, Artificial Sequence
  Description of Artificial Sequence: Synthetic polynucleotide
atttcctctcatcccatccggggtgagagtcttttcccccgacttatggctcatgcatgcatcaaaaaagatgtgagcttgatcaaaaacaaaaaatatttcactcgacaggagtatttatattgcgcccgttacgtgggcttcgactgtaaatcagaaaggagaaaacacct

SEQ ID NO: 153 - DNA, 305 bp, Artificial Sequence
  Description of Artificial Sequence: Synthetic polynucleotide
gtcagcataacaccctgacctctcattaattgttcatgccgggcggcactatcgtcgtccggccttttcctctcttactctgctacgtacatctatttctataaatccgttcaatttgtctgttttttgcacaaacatgaaatatcagacaattccgtgacttaagaaaatttatacaaatcagcaatataccccttaaggagtatataaaggtgaatttgatttacatcaataagcggggttgctgaatcgttaaggatccctctagaaataattttgtttaactttaagaaggagatatacat

SEQ ID NO: 154 - DNA, 180 bp, Artificial Sequence
  Description of Artificial Sequence: Synthetic polynucleotide
catttcctctcatcccatccggggtgagagtcttttcccccgacttatggctcatgcatgcatcaaaaaagatgtgagcttgatcaaaaacaaaaaatatttcactcgacaggagtatttatattgcgcccggatccctctagaaataattttgtttaactttaagaaggagatatacat

SEQ ID NO: 155 - DNA, 199 bp, Artificial Sequence
  Description of Artificial Sequence: Synthetic polynucleotide
agttgttcttattggtggtgttgctttatggttgcatcgtagtaaatggttgtaacaaaagcaatttttccggctgtctgtatacaaaaacgccgtaaagtttgagcgaagtcaataaactctctacccattcagggcaatatctctcttggatccctctagaaataattttgtttaactttaagaaggagatatacat

SEQ ID NO: 156 - DNA, 117 bp, Artificial Sequence
  Description of Artificial Sequence: Synthetic polynucleotide
atccccatcactcttgatggagatcaattccccaagctgctagagcgttaccttgcccttaaacattagcaatgtcgatttatcagagggccgacaggctcccacaggagaaaaccg

SEQ ID NO: 157 - DNA, 108 bp, Artificial Sequence
  Description of Artificial Sequence: Synthetic polynucleotide
ctcttgatcgttatcaattcccacgctgtttcagagcgttaccttgcccttaaacattagcaatgtcgatttatcagagggccgacaggctcccacaggagaaaaccg

SEQ ID NO: 158 - DNA, 290 bp, Artificial Sequence; identical to SEQ ID NO: 151
  Description of Artificial Sequence: Synthetic polynucleotide

SEQ ID NO: 159 - DNA, 433 bp, Artificial Sequence
  Description of Artificial Sequence: Synthetic polynucleotide
cggcccgatcgttgaacatagcggtccgcaggcggcactgcttacagcaaacggtctgtacgctgtcgtctttgtgatgtgcttcctgttaggtttcgtcagccgtcaccgtcagcataacaccctgacctctcattaattgctcatgccggacggcactatcgtcgtccggccttttcctctcttcccccgctacgtgcatctatttctataaacccgctcattttgtctattttttgcacaaacatgaaatatcagacaattccgtgacttaagaaaatttatacaaatcagcaatatacccattaaggagtatataaaggtgaatttgatttacatcaataagcggggttgctgaatcgttaaggtaggcggtaatagaaaagaaatcgaggcaaaaatgtttgtttaactttaagaaggagatatacat

SEQ ID NO: 160 - DNA, 290 bp, Artificial Sequence
  Description of Artificial Sequence: Synthetic polynucleotide
gtcagcataacaccctgacctctcattaattgctcatgccggacggcactatcgtcgtccggccttttcctctcttcccccgctacgtgcatctatttctataaacccgctcattttgtctattttttgcacaaacatgaaatatcagacaattccgtgacttaagaaaatttatacaaatcagcaatatacccattaaggagtatataaaggtgaatttgatttacatcaataagcggggttgctgaatcgttaaggtaggcggtaatagaaaagaaatcgaggcaaaa

SEQ ID NO: 161 - DNA, 173 bp, Artificial Sequence; identical to SEQ ID NO: 152
  Description of Artificial Sequence: Synthetic polynucleotide

SEQ ID NO: 162 - DNA, 305 bp, Artificial Sequence; identical to SEQ ID NO: 153
  Description of Artificial Sequence: Synthetic polynucleotide

SEQ ID NO: 163 - DNA, 180 bp, Artificial Sequence; identical to SEQ ID NO: 154
  Description of Artificial Sequence: Synthetic polynucleotide

SEQ ID NO: 164 - DNA, 199 bp, Artificial Sequence; identical to SEQ ID NO: 155
  Description of Artificial Sequence: Synthetic polynucleotide

SEQ ID NO: 165 - DNA, 207 bp, Artificial Sequence
  Description of Artificial Sequence: Synthetic polynucleotide
agttgttcttattggtggtgttgctttatggttgcatcgtagtaaatggttgtaacaaaagcaatttttccggctgtctgtatacaaaaacgccgcaaagtttgagcgaagtcaataaactctctacccattcagggcaatatctctcttggatccaaagtgaactctagaaataattttgtttaactttaagaaggagatatacat

SEQ ID NO: 166 - DNA, 390 bp, Artificial Sequence
  Description of Artificial Sequence: Synthetic polynucleotide
tcgtctttgtgatgtgcttcctgttaggtttcgtcagccgtcaccgtcagcataacaccctgacctctcattaattgctcatgccggacggcactatcgtcgtccggccttttcctctcttcccccgctacgtgcatctatttctataaacccgctcattttgtctattttttgcacaaacatgaaatatcagacaattccgtgacttaagaaaatttatacaaatcagcaatatacccattaaggagtatataaaggtgaatttgatttacatcaataagcggggttgctgaatcgttaaggtagaaatgtgatctagttcacatttgcggtaatagaaaagaaatcgaggcaaaaatgtttgtttaactttaagaaggagatatacat

SEQ ID NO: 167 - DNA, 200 bp, Artificial Sequence
  Description of Artificial Sequence: Synthetic polynucleotide
agttgttcttattggtggtgttgctttatggttgcatcgtagtaaatggttgtaacaaaagcaatttttccggctgtctgtatacaaaaacgccgcaaagtttgagcgaagtcaataaactctctacccattcagggcaatatctctcaaatgtgatctagttcacattttttgtttaactttaagaaggagatatacat

SEQ ID NO: 168 - DNA, 355 bp, Artificial Sequence
  Description of Artificial Sequence: Synthetic polynucleotide
tgtggcttttatgaaaatcacacagtgatcacaaattttaaacagagcacaaaatgctgcctcgaaatgagggcgggaaaataaggttatcagccttgttttctccctcattacttgaaggatatgaagctaaaacccttttttataaagcatttgtccgaattcggacataatcaaaaaagcttaattaagatcaatttgatctacatctctttaaccaacaatatgtaagatctcaactatcgcatccgtggattaattcaattataacttctctctaacgctgtgtatcgtaacggtaacactgtagaggggagcacattgatgcgaattcattaaagaggagaaaggtacc

SEQ ID NO: 169 - DNA, 228 bp, Artificial Sequence
  Description of Artificial Sequence: Synthetic polynucleotide
ttccgaaaattcctggcgagcagataaataagaattgttcttatcaatatatctaactcattgaatctttattagttttgtttttcacgcttgttaccactattagtgtgataggaacagccagaatagcggaacacatagccggtgctatacttaatctcgttaattactgggacataacatcaagaggatatgaaattcgaattcattaaagaggagaaaggtacc

SEQ ID NO: 170 - DNA, 334 bp, Artificial Sequence
  Description of Artificial Sequence: Synthetic polynucleotide
gcttagatcaggtgattgccctttgtttatgagggtgttgtaatccatgtcgttgttgcatttgtaagggcaacacctcagcctgcaggcaggcactgaagataccaaagggtagttcagattacacggtcacctggaaagggggccattttactttttatcgccgctggcggtgcaaagttcacaaagttgtcttacgaaggttgtaaggtaaaacttatcgatttgataatggaaacgcattagccgaatcggcaaaaattggttaccttacatctcatcgaaaacacggaggaagtatagatgcgaattcattaaagaggagaaaggtacc

SEQ ID NO: 171 - DNA, 134 bp, Artificial Sequence
  Description of Artificial Sequence: Synthetic polynucleotide
ctcgagttcattatccatcctccatcgccacgatagttcatggcgataggtagaatagcaatgaacgattatccctatcaagcattctgactgataattgctcacacgaattcattaaagaggagaaaggtacc

SEQ ID NO: 172 - DNA, 1921 bp, Artificial Sequence
  Description of Artificial Sequence: Synthetic polynucleotide
ttacccgtctggattttcagtacgcgcttttaaacgacgccacagcgtggtacggctgatccccaaataacgtgcggcggcgcgcttatcgccattaaagcgtgcgagcacctcctgcaatggaagcgcttctgctgacgagggcgtgatttctgctgtggtccccaccagttcaggtaataattgccgcataaattgtctgtccagtgttggtgcgggatcgacgcttaaaaaaagcgccaggcgttccatcatattccgcagttcgcgaatattaccgggccaatgatagttcagtagaagcggctgacactgcgtcagcccatgacgcaccgattcggtaaaagggatctccatcgcggccagcgattgttttaaaaagttttccgccagaggcagaatatcaggctgtcgctcgcgcaaggggggaagcggcagacgcagaatgctcaaacggtaaaacagatcggtacgaaaacgtccttgcgttatctcccgatccagatcgcaatgcgtggcgctgatcacccggacatctaccgggatcggctgatgcccgccaacgcgggtgacggctttttcctccagtacgcgtagaaggcgggtttgtaacggcagcggcatttcgccaatttcgtcaagaaacagcgtgccgccgtgggcgacctcaaacagccccgcacgtccacctcgtcttgagccggtaaacgctccctcctcatagccaaacagttcagcctccagcaacgactcggtaatcgcgccgcaattaacggcgacaaagggcggagaaggcttgttctgacggtggggctgacggttaaacaacgcctgatgaatcgcttgcgccgccagctctttcccggtccctgtttccccctgaatcagcactgccgcgcgggaacgggcatagagtgtaatcgtatggcgaacctgctccatttgtggtgaatcgccgaggatatcgctcagcgcataacgggtctgtaatcccttgctggaggtatgctggctatactgacgccgtgtcaggcgggtcatatccagcgcatcatggaaagcctgacgtacggtggccgctgaataaataaagatggcggtcattcctgcctcttccgccaggtcggtaattagtcctgccccaattacagcctcaatgccgttagctttgagctcgttaatttgcccgcgagcatcctcttcagtgatatagcttcgctgttcaagacggaggtgaaacgttttctgaaaggcgaccagagccggaatggtctcctgataggtcacgattcccattgaggaagtcagctttcccgcttttgccagagcctgtaatacatcgaatccgctgggtttgatgaggatgacaggtaccgacagtcggctttttaaataagcgccgttggaacctgccgcgataatcgcgtcgcagcgttcggttgccagttttttgcgaatgtaggctactgccttttcaaaaccgagctgaataggcgtgatcgtcgccagatgatcaaactccaggctgatatcccgaaatagttcgaacaggcgcgttaccgagaccgtccagatcaccggtttatcgctattatcgcgcgaagcgctatgcacagtaaccatcgtcgtagattcatgtttaaggaacgaattcttgttttatagatgtttcgttaatgttgcaatgaaacacaggcctccgtttcatgaaacgttagctgactcgtttttcttgtgactcgtctgtcagtattaaaaaagatttttcatttaactgattgtttttaaattgaattttatttaatggtttctcggtttttgggtctggcatatcccttgctttaatgagtgcatcttaattaacaattcaataacaagagggctgaatagtaatttcaacaaaataacgagcattcgaatg

SEQ ID NO: 173 - DNA, 305 bp, Artificial Sequence
  Description of Artificial Sequence: Synthetic polynucleotide
cagacattgccgtcactgcgtcttttactggctcttctcgctaacccaaccggtaaccccgcttattaaaagcattctgtaacaaagcgggaccaaagccatgacaaaaacgcgtaacaaaagtgtctataatcacggcagaaaagtccacattgattatttgcacggcgtcacactttgctatgccatagcatttttatccataagattagcggatccagcctgacgctttttttcgcaactctctactgtttctccatacctctagaaataattttgtttaactttaagaaggagatatacat

SEQ ID NO: 174 - DNA, 897 bp, Artificial Sequence
  Description of Artificial Sequence: Synthetic polynucleotide
ttattcacaacctgccctaaactcgctcggactcgccccggtgcattttttaaatactcgcgagaaatagagttgatcgtcaaaaccgacattgcgaccgacggtggcgataggcatccgggtggtgctcaaaagcagcttcgcctgactgatgcgctggtcctcgcgccagcttaatacgctaatccctaactgctggcggaacaaatgcgacagacgcgacggcgacaggcagacatgctgtgcgacgctggcgatatcaaaattactgtctgccaggtgatcgctgatgtactgacaagcctcgcgtacccgattatccatcggtggatggagcgactcgttaatcgcttccatgcgccgcagtaacaattgctcaagcagatttatcgccagcaattccgaatagcgcccttccccttgtccggcattaatgatttgcccaaacaggtcgctgaaatgcggctggtgcgcttcatccgggcgaaagaaaccggtattggcaaatatcgacggccagttaagccattcatgccagtaggcgcgcggacgaaagtaaacccactggtgataccattcgtgagcctccggatgacgaccgtagtgatgaatctctccaggcgggaacagcaaaatatcacccggtcggcagacaaattctcgtccctgatttttcaccaccccctgaccgcgaatggtgagattgagaatataacctttcattcccagcggtcggtcgataaaaaaatcgagataaccgttggcctcaatcggcgttaaacccgccaccagatgggcgttaaacgagtatcccggcagcaggggatcattttgcgcttcagccatacttttcatactcccgccattcagagaagaaaccaattgtccatattgcat

SEQ ID NO: 175 - protein, 298 aa, Artificial Sequence
  Description of Artificial Sequence: Synthetic polypeptide
MQYGQLVSSLNGGSMKSMAEAQNDPLLPGYSFNAHLVAGLTPIEANGYLDFFIDRPLGMKGYILNLTIRGQGVVKNQGREFVCRPGDILLFPPGEIHHYGRHPEAHEWYHQWVYFRPRAYWHEWLNWPSIFANTGFFRPDEAHQPHFSDLFGQIINAGQGEGRYSELLAINLLEQLLLRRMEAINESLHPPMDNRVREACQYISDHLADSNFDIASVAQHVCLSPSRLSHLFRQQLGISVLSWREDQRISQAKLLLSTTRMPIATVGRNVGFDDQLYFSRVFKKCTGASPSEFRAGCE

SEQ ID NO: 176 - DNA, 280 bp, Artificial Sequence
  Description of Artificial Sequence: Synthetic polynucleotide
cggtgagcatcacatcaccacaattcagcaaattgtgaacatcatcacgttcatctttccctggttgccaatggcccattttcctgtcagtaacgagaaggtcgcgaatcaggcgctttttagactggtcgtaatgaaattcagctgtcaccggatgtgctttccggtctgatgagtccgtgaggacgaaacagcctctacaaataattttgtttaaaacaacacccactaagataactctagaaataattttgtttaactttaagaaggagatatacat

SEQ ID NO: 177 - DNA, 326 bp, Artificial Sequence
  Description of Artificial Sequence: Synthetic polynucleotide
attcaccaccctgaattgactctcttccgggcgctatcatgccataccgcgaaaggttttgcgccattcgatggcgcgccgcttcgtcaggccacatagctttcttgttctgatcggaacgatcgttggctgtgttgacaattaatcatcggctcgtataatgtgtggaattgtgagcgctcacaattagctgtcaccggatgtgctttccggtctgatgagtccgtgaggacgaaacagcctctacaaataattttgtttaaaacaacacccactaagataactctagaaataattttgtttaactttaagaaggagatatacat

SEQ ID NO: 178 - DNA, 22 bp, Artificial Sequence
  Description of Artificial Sequence: Synthetic oligonucleotide
ggaattgtgagcgctcacaatt

SEQ ID NO: 179 - DNA, 1083 bp, Artificial Sequence
  Description of Artificial Sequence: Synthetic polynucleotide
tcactgcccgctttccagtcgggaaacctgtcgtgccagctgcattaatgaatcggccaacgcgcggggagaggcggtttgcgtattgggcgccagggtggtttttcttttcaccagtgagactggcaacagctgattgcccttcaccgcctggccctgagagagttgcagcaagcggtccacgctggtttgccccagcaggcgaaaatcctgtttgatggtggttaacggcgggatataacatgagctatcttcggtatcgtcgtatcccactaccgagatatccgcaccaacgcgcagcccggactcggtaatggcgcgcattgcgcccagcgccatctgatcgttggcaaccagcatcgcagtgggaacgatgccctcattcagcatttgcatggtttgttgaaaaccggacatggcactccagtcgccttcccgttccgctatcggctgaatttgattgcgagtgagatatttatgccagccagccagacgcagacgcgccgagacagaacttaatgggcccgctaacagcgcgatttgctggtgacccaatgcgaccagatgctccacgcccagtcgcgtaccgtcctcatgggagaaaataatactgttgatgggtgtctggtcagagacatcaagaaataacgccggaacattagtgcaggcagcttccacagcaatggcatcctggtcatccagcggatagttaatgatcagcccactgacgcgttgcgcgagaagattgtgcaccgccgctttacaggcttcgacgccgcttcgttctaccatcgacaccaccacgctggcacccagttgatcggcgcgagatttaatcgccgcgacaatttgcgacggcgcgtgcagggccagactggaggtggcaacgccaatcagcaacgactgtttgcccgccagttgttgtgccacgcggttgggaatgtaattcagctccgccatcgccgcttccactttttcccgcgttttcgcagaaacgtggctggcctggttcaccacgcgggaaacggtctgataagagacaccggcatactctgcgacatcgtataacgttactggtttcat

SEQ ID NO: 180 - protein, 360 aa, Artificial Sequence
  Description of Artificial Sequence: Synthetic polypeptide
MKPVTLYDVAEYAGVSYQTVSRVVNQASHVSAKTREKVEAAMAELNYIPNRVAQQLAGKQSLLIGVATSSLALHAPSQIVAAIKSRADQLGASVVVSMVERSGVEACKAAVHNLLAQRVSGLIINYPLDDQDAIAVEAACTNVPALFLDVSDQTPINSIIFSHEDGTRLGVEHLVALGHQQIALLAGPLSSVSARLRLAGWHKYLTRNQIQPIAEREGDWSAMSGFQQTMQMLNEGIVPTAMLVANDQMALGAMRAITESGLRVGADISVVGYDDTEDSSCYIPPLTTIKQDFRLLGQTSVDRLLQLSQGQAVKGNQLLPVSLVKRKTTLAPNTQTASPRALADSLMQLARQVSRLESGQ

SEQ ID NO: 181-182 - skipped (2 entries)

SEQ ID NO: 183 - DNA, 222 bp, Artificial Sequence
  Description of Artificial Sequence: Synthetic polynucleotide
acgttaaatctatcaccgcaagggataaatatctaacaccgtgcgtgttgactattttacctctggcggtgataatggttgcatagctgtcaccggatgtgctttccggtctgatgagtccgtgaggacgaaacagcctctacaaataattttgtttaaaacaacacccactaagataactctagaaataattttgtttaactttaagaaggagatatacat

SEQ ID NO: 184 - DNA, 714 bp, Artificial Sequence
  Description of Artificial Sequence: Synthetic polynucleotide
tcagccaaacgtctcttcaggccactgactagcgataactttccccacaacggaacaactctcattgcatgggatcattgggtactgtgggtttagtggttgtaaaaacacctgaccgctatccctgatcagtttcttgaaggtaaactcatcacccccaagtctggctatgcagaaatcacctggctcaacagcctgctcagggtcaacgagaattaacattccgtcaggaaagcttggcttggagcctgttggtgcggtcatggaattaccttcaacctcaagccagaatgcagaatcactggcttttttggttgtgcttacccatctctccgcatcacctttggtaaaggttctaagcttaggtgagaacatccctgcctgaacatgagaaaaaacagggtactcatactcacttctaagtgacggctgcatactaaccgcttcatacatctcgtagatttctctggcgattgaagggctaaattcttcaacgctaactttgagaatttttgtaagcaatgcggcgttataagcatttaatgcattgatgccattaaataaagcaccaacgcctgactgccccatccccatcttgtctgcgacagattcctgggataagccaagttcatttttctttttttcataaattgctttaaggcgacgtgcgtcctcaagctgctcttgtgttaatggtttcttttttgtgctcat

SEQ ID NO: 185 - protein, 237 aa, Artificial Sequence
  Description of Artificial Sequence: Synthetic polypeptide
MSTKKKPLTQEQLEDARRLKAIYEKKKNELGLSQESVADKMGMGQSGVGALFNGINALNAYNAALLTKILKVSVEEFSPSIAREIYEMYEAVSMQPSLRSEYEYPVFSHVQAGMFSPKLRTFTKGDAERWVSTTKKASDSAFWLEVEGNSMTAPTGSKPSFPDGMLILVDPEQAVEPGDFCIARLGGDEFTFKKLIRDSGQVFLQPLNPQYPMIPCNESCSVVGKVIASQWPEETFG

SEQ ID NO: 186 - DNA, 56 bp, Artificial Sequence
  Description of Artificial Sequence: Synthetic oligonucleotide
gttgacactctatcattgatagagttattttaccactccctatcagtgatagagaa

SEQ ID NO: 187 - DNA, 642 bp, Artificial Sequence
  Description of Artificial Sequence: Synthetic polynucleotide
ttaagacccactttcacatttaagttgtttttctaatccgcatatgatcaattcaaggccgaataagaaggctggctctgcaccttggtgatcaaataattcgatagcttgtcgtaataatggcggcatactatcagtagtaggtgtttccctttcttctttagcgacttgatgctcttgatcttccaatacgcaacctaaagtaaaatgccccacagcgctgagtgcatataatgcattctctagtgaaaaaccttgttggcataaaaaggctaattgattttcgagagtttcatactgtttttctgtaggccgtgtacctaaatgtacttttgctccatcgcgatgacttagtaaagcacatctaaaacttttagcgttattacgtaaaaaatcttgccagctttccccttctaaagggcaaaagtgagtatggtgcctatctaacatctcaatggctaaggcgtcgagcaaagcccgcttattttttacatgccaatacaatgtaggctgctctacacctagcttctgggcgagtttacgggttgttaaaccttcgattccgacctcattaagcagctctaatgcgctgttaatcactttacttttatctaatctagacatcattaattcctaattttt

SEQ ID NO: 188 - DNA, 225 bp, Artificial Sequence
  Description of Artificial Sequence: Synthetic polynucleotide
tcacctttcccggattaaacgcttttttgcccggtggcatggtgctaccggcgatcacaaacggttaattatgacacaaattgacctgaatgaatatacagtattggaatgcattacccggagtgttgtgtaacaatgtctggccaggtttgtttcccggaaccgaggtcacaacatagtaaaagcgctattggtaatggtacaatcgcgcgtttacacttattc

SEQ ID NO: 189 - DNA, 30 bp, Artificial Sequence
  Description of Artificial Sequence: Synthetic oligonucleotide
taaacaactaacggacaattctacctaaca

SEQ ID NO: 190 - DNA, 30 bp, Artificial Sequence
  Description of Artificial Sequence: Synthetic oligonucleotide
acatcaagccaaattaaacaggattaacac

SEQ ID NO: 191 - DNA, 30 bp, Artificial Sequence
  Description of Artificial Sequence: Synthetic oligonucleotide
gaggtaaaatagtcaacacgcacggtgtta

SEQ ID NO: 192 - DNA, 30 bp, Artificial Sequence
  Description of Artificial Sequence: Synthetic oligonucleotide
caggccggaataactccctataatgcgcca

SEQ ID NO: 193 - DNA, 30 bp, Artificial Sequence
  Description of Artificial Sequence: Synthetic oligonucleotide
ggctagctcagtcctaggtacagtgctagc

SEQ ID NO: 194 - DNA, 30 bp, Artificial Sequence
  Description of Artificial Sequence: Synthetic oligonucleotide
agctagctcagtcctaggtattatgctagc

SEQ ID NO: 195 - DNA, 30 bp, Artificial Sequence
  Description of Artificial Sequence: Synthetic oligonucleotide
agctagctcagtcctaggtactgtgctagc

SEQ ID NO: 196 - DNA, 30 bp, Artificial Sequence
  Description of Artificial Sequence: Synthetic oligonucleotide
agctagctcagtcctagggattatgctagc

SEQ ID NO: 197 - DNA, 30 bp, Artificial Sequence
  Description of Artificial Sequence: Synthetic oligonucleotide
agctagctcagtcctaggtattgtgctagc

SEQ ID NO: 198 - DNA, 30 bp, Artificial Sequence
  Description of Artificial Sequence: Synthetic oligonucleotide
ggctagctcagtcctaggtactatgctagc

SEQ ID NO: 199 - DNA, 30 bp, Artificial Sequence
  Description of Artificial Sequence: Synthetic oligonucleotide
ggctagctcagtcctaggtatagtgctagc

SEQ ID NO: 200 - DNA, 30 bp, Artificial Sequence
  Description of Artificial Sequence: Synthetic oligonucleotide
ggctagctcagccctaggtattatgctagc

SEQ ID NO: 201 - DNA, 30 bp, Artificial Sequence
  Description of Artificial Sequence: Synthetic oligonucleotide
agctagctcagtcctaggtataatgctagc

SEQ ID NO: 202 - DNA, 30 bp, Artificial Sequence
  Description of Artificial Sequence: Synthetic oligonucleotide
agctagctcagtcctagggactgtgctagc

SEQ ID NO: 203 - DNA, 30 bp, Artificial Sequence
  Description of Artificial Sequence: Synthetic oligonucleotide
ggctagctcagtcctaggtacaatgctagc

SEQ ID NO: 204 - DNA, 30 bp, Artificial Sequence; identical to SEQ ID NO: 199
  Description of Artificial Sequence: Synthetic oligonucleotide

SEQ ID NO: 205 - DNA, 30 bp, Artificial Sequence; identical to SEQ ID NO: 196
  Description of Artificial Sequence: Synthetic oligonucleotide

SEQ ID NO: 206 - DNA, 30 bp, Artificial Sequence
  Description of Artificial Sequence: Synthetic oligonucleotide
ggctagctcagtcctagggattatgctagc

SEQ ID NO: 207 - DNA, 30 bp, Artificial Sequence; identical to SEQ ID NO: 203
  Description of Artificial Sequence: Synthetic oligonucleotide

SEQ ID NO: 208 - DNA, 30 bp, Artificial Sequence
  Description of Artificial Sequence: Synthetic oligonucleotide
agctagctcagcccttggtacaatgctagc

SEQ ID NO: 209 - DNA, 30 bp, Artificial Sequence
  Description of Artificial Sequence: Synthetic oligonucleotide
agctagctcagtcctagggactatgctagc

SEQ ID NO: 210 - DNA, 30 bp, Artificial Sequence
  Description of Artificial Sequence: Synthetic oligonucleotide
agctagctcagtcctagggattgtgctagc

SEQ ID NO: 211 - DNA, 30 bp, Artificial Sequence
  Description of Artificial Sequence: Synthetic oligonucleotide
ggctagctcagtcctaggtattgtgctagc

SEQ ID NO: 212 - DNA, 30 bp, Artificial Sequence; identical to SEQ ID NO: 201
  Description of Artificial Sequence: Synthetic oligonucleotide

SEQ ID NO: 213 - DNA, 30 bp, Artificial Sequence
  Description of Artificial Sequence: Synthetic oligonucleotide
ggctagctcagtcctaggtattatgctagc

SEQ ID NO: 214 - DNA, 30 bp, Artificial Sequence; identical to SEQ ID NO: 203
  Description of Artificial Sequence: Synthetic oligonucleotide

SEQ ID NO: 215 - DNA, 30 bp, Artificial Sequence
  Description of Artificial Sequence: Synthetic oligonucleotide
aaagtgtgacgccgtgcaaataatcaatgt

SEQ ID NO: 216 - DNA, 30 bp, Artificial Sequence
  Description of Artificial Sequence: Synthetic oligonucleotide
gacgaatacttaaaatcgtcatacttattt

SEQ ID NO: 217 - DNA, 30 bp, Artificial Sequence
  Description of Artificial Sequence: Synthetic oligonucleotide
aaacctttcgcggtatggcatgatagcgcc

SEQ ID NO: 218 - DNA, 30 bp, Artificial Sequence
  Description of Artificial Sequence: Synthetic oligonucleotide
tgatagcgcccggaagagagtcaattcagg

SEQ ID NO: 219 - DNA, 30 bp, Artificial Sequence
  Description of Artificial Sequence: Synthetic oligonucleotide
ttatttaccgtgacgaactaattgctcgtg

SEQ ID NO: 220 - DNA, 30 bp, Artificial Sequence
  Description of Artificial Sequence: Synthetic oligonucleotide
catacgccgttatacgttgtttacgctttg

SEQ ID NO: 221 - DNA, 30 bp, Artificial Sequence
  Description of Artificial Sequence: Synthetic oligonucleotide
ttatgcttccggctcgtatgttgtgtggac

SEQ ID NO: 222 - DNA, 30 bp, Artificial Sequence
  Description of Artificial Sequence: Synthetic oligonucleotide
ttatgcttccggctcgtatggtgtgtggac

SEQ ID NO: 223 - DNA, 30 bp, Artificial Sequence; identical to SEQ ID NO: 198
  Description of Artificial Sequence: Synthetic oligonucleotide

SEQ ID NO: 224 - DNA, 30 bp, Artificial Sequence
  Description of Artificial Sequence: Synthetic oligonucleotide
atatatatatatatataatggaagcgtttt

SEQ ID NO: 225 - DNA, 30 bp, Artificial Sequence; identical to SEQ ID NO: 224
  Description of Artificial Sequence: Synthetic oligonucleotide

SEQ ID NO: 226 - DNA, 30 bp, Artificial Sequence
  Description of Artificial Sequence: Synthetic oligonucleotide
ccccgaaagcttaagaatataattgtaagc

SEQ ID NO: 227 - DNA, 30 bp, Artificial Sequence; identical to SEQ ID NO: 226
  Description of Artificial Sequence: Synthetic oligonucleotide

SEQ ID NO: 228 - DNA, 30 bp, Artificial Sequence
  Description of Artificial Sequence: Synthetic oligonucleotide
tgacaatatatatatatatataatgctagc

SEQ ID NO: 229 - DNA, 30 bp, Artificial Sequence
  Description of Artificial Sequence: Synthetic oligonucleotide
acaatatatatatatatatataatgctagc

SEQ ID NO: 230 - DNA, 30 bp, Artificial Sequence
  Description of Artificial Sequence: Synthetic oligonucleotide
aatatatatatatatatatataatgctagc

SEQ ID NO: 231 - DNA, 30 bp, Artificial Sequence
  Description of Artificial Sequence: Synthetic oligonucleotide
tatatatatatatatatatataatgctagc

SEQ ID NO: 232 - DNA, 30 bp, Artificial Sequence; identical to SEQ ID NO: 231
  Description of Artificial Sequence: Synthetic oligonucleotide

SEQ ID NO: 233 - DNA, 30 bp, Artificial Sequence
  Description of Artificial Sequence: Synthetic oligonucleotide
aaaaaaaaaaaaaaaaaatataatgctagc

SEQ ID NO: 234 - DNA, 30 bp, Artificial Sequence; identical to SEQ ID NO: 233
  Description of Artificial Sequence: Synthetic oligonucleotide

SEQ ID NO: 235 - DNA, 30 bp, Artificial Sequence
  Description of Artificial Sequence: Synthetic oligonucleotide
ggaattgtgagcggataacaatttcacaca

SEQ ID NO: 236 - DNA, 30 bp, Artificial Sequence; identical to SEQ ID NO: 235
  Description of Artificial Sequence: Synthetic oligonucleotide

SEQ ID NO: 237 - DNA, 30 bp, Artificial Sequence; identical to SEQ ID NO: 235
  Description of Artificial Sequence: Synthetic oligonucleotide

SEQ ID NO: 238 - DNA, 30 bp, Artificial Sequence; identical to SEQ ID NO: 235
  Description of Artificial Sequence: Synthetic oligonucleotide

SEQ ID NO: 239 - DNA, 30 bp, Artificial Sequence; identical to SEQ ID NO: 235
  Description of Artificial Sequence: Synthetic oligonucleotide

SEQ ID NO: 240 - DNA, 30 bp, Artificial Sequence; identical to SEQ ID NO: 235
  Description of Artificial Sequence: Synthetic oligonucleotide

SEQ ID NO: 241 - DNA, 30 bp, Artificial Sequence; identical to SEQ ID NO: 235
  Description of Artificial Sequence: Synthetic oligonucleotide

SEQ ID NO: 242 - DNA, 30 bp, Artificial Sequence; identical to SEQ ID NO: 235
  Description of Artificial Sequence: Synthetic oligonucleotide

SEQ ID NO: 243 - DNA, 30 bp, Artificial Sequence; identical to SEQ ID NO: 235
  Description of Artificial Sequence: Synthetic oligonucleotide

SEQ ID NO: 244 - DNA, 30 bp, Artificial Sequence; identical to SEQ ID NO: 235
  Description of Artificial Sequence: Synthetic oligonucleotide

SEQ ID NO: 245 - DNA, 30 bp, Artificial Sequence; identical to SEQ ID NO: 235
  Description of Artificial Sequence: Synthetic oligonucleotide

SEQ ID NO: 246 - DNA, 30 bp, Artificial Sequence; identical to SEQ ID NO: 235
  Description of Artificial Sequence: Synthetic oligonucleotide

SEQ ID NO: 247 - DNA, 30 bp, Artificial Sequence; identical to SEQ ID NO: 235
  Description of Artificial Sequence: Synthetic oligonucleotide

SEQ ID NO: 248 - DNA, 30 bp, Artificial Sequence; identical to SEQ ID NO: 235
  Description of Artificial Sequence: Synthetic oligonucleotide

SEQ ID NO: 249 - DNA, 30 bp, Artificial Sequence
  Description of Artificial Sequence: Synthetic oligonucleotide
gattaaagaggagaaatactagagtactag

SEQ ID NO: 250 - DNA, 30 bp, Artificial Sequence
  Description of Artificial Sequence: Synthetic oligonucleotide
caccttcgggtgggcctttctgcgtttata

SEQ ID NO: 251 - DNA, 30 bp, Artificial Sequence; identical to SEQ ID NO: 250
  Description of Artificial Sequence: Synthetic oligonucleotide

SEQ ID NO: 252 - DNA, 30 bp, Artificial Sequence; identical to SEQ ID NO: 250
  Description of Artificial Sequence: Synthetic oligonucleotide

SEQ ID NO: 253 - DNA, 30 bp, Artificial Sequence; identical to SEQ ID NO: 250
  Description of Artificial Sequence: Synthetic oligonucleotide

SEQ ID NO: 254 - DNA, 30 bp, Artificial Sequence; identical to SEQ ID NO: 193
  Description of Artificial Sequence: Synthetic oligonucleotide

SEQ ID NO: 255 - DNA, 30 bp, Artificial Sequence
  Description of Artificial Sequence: Synthetic oligonucleotide
tgctagctactagagattaaagaggagaaa

SEQ ID NO: 256 - DNA, 30 bp, Artificial Sequence
  Description of Artificial Sequence: Synthetic oligonucleotide
ttgtgagcggataacaagatactgagcaca

SEQ ID NO: 257 - DNA, 30 bp, Artificial Sequence; identical to SEQ ID NO: 256
  Description of Artificial Sequence: Synthetic oligonucleotide

SEQ ID NO: 258 - DNA, 30 bp, Artificial Sequence; identical to SEQ ID NO: 256
  Description of Artificial Sequence: Synthetic oligonucleotide

SEQ ID NO: 259 - DNA, 30 bp, Artificial Sequence; identical to SEQ ID NO: 193
  Description of Artificial Sequence: Synthetic oligonucleotide

SEQ ID NO: 260 - DNA, 30 bp, Artificial Sequence; identical to SEQ ID NO: 194
  Description of Artificial Sequence: Synthetic oligonucleotide

SEQ ID NO: 261 - DNA, 30 bp, Artificial Sequence; identical to SEQ ID NO: 195
  Description of Artificial Sequence: Synthetic oligonucleotide

SEQ ID NO: 262 - DNA, 30 bp, Artificial Sequence; identical to SEQ ID NO: 196
  Description of Artificial Sequence: Synthetic oligonucleotide

SEQ ID NO: 263 - DNA, 30 bp, Artificial Sequence; identical to SEQ ID NO: 199
  Description of Artificial Sequence: Synthetic oligonucleotide

SEQ ID NO: 264 - DNA, 30 bp, Artificial Sequence; identical to SEQ ID NO: 206
  Description of Artificial Sequence: Synthetic oligonucleotide

SEQ ID NO: 265 - DNA, 30 bp, Artificial Sequence; identical to SEQ ID NO: 203
  Description of Artificial Sequence: Synthetic oligonucleotide

SEQ ID NO: 266 - DNA, 30 bp, Artificial Sequence; identical to SEQ ID NO: 210
  Description of Artificial Sequence: Synthetic oligonucleotide

SEQ ID NO: 267 - DNA, 30 bp, Artificial Sequence; identical to SEQ ID NO: 211
  Description of Artificial Sequence: Synthetic oligonucleotide

SEQ ID NO: 268 - DNA, 30 bp, Artificial Sequence
  Description of Artificial Sequence: Synthetic oligonucleotide
cctgtttttatgttattctctctgtaaagg

SEQ ID NO: 269 - DNA, 30 bp, Artificial Sequence
  Description of Artificial Sequence: Synthetic oligonucleotide
aaatatttgcttatacaatcttcctgtttt

SEQ ID NO: 270 - DNA, 30 bp, Artificial Sequence
  Description of Artificial Sequence: Synthetic oligonucleotide
gctgataaaccgatacaattaaaggctcct

SEQ ID NO: 271 - DNA, 30 bp, Artificial Sequence
  Description of Artificial Sequence: Synthetic oligonucleotide
ctcttctcagcgtcttaatctaagctatcg

SEQ ID NO: 272 - DNA, 30 bp, Artificial Sequence
  Description of Artificial Sequence: Synthetic oligonucleotide
atgagccagttcttaaaatcgcataaggta

SEQ ID NO: 273 - DNA, 30 bp, Artificial Sequence
  Description of Artificial Sequence: Synthetic oligonucleotide
ctattgattgtgacaaaataaacttattcc

SEQ ID NO: 274 - DNA, 30 bp, Artificial Sequence
  Description of Artificial Sequence: Synthetic oligonucleotide
gtttcgcgcttggtataatcgctgggggtc

SEQ ID NO: 275 - DNA, 30 bp, Artificial Sequence
  Description of Artificial Sequence: Synthetic oligonucleotide
ctttgcttctgactataatagtcagggtaa

SEQ ID NO: 276 - DNA, 30 bp, Artificial Sequence
  Description of Artificial Sequence: Synthetic oligonucleotide
aaaccgatacaattaaaggctcctgctagc

SEQ ID NO: 277 - DNA, 30 bp, Artificial Sequence
  Description of Artificial Sequence: Synthetic oligonucleotide
caccacactgatagtgctagtgtagatcac

SEQ ID NO: 278 - DNA, 30 bp, Artificial Sequence
  Description of Artificial Sequence: Synthetic oligonucleotide
gccggaataactccctataatgcgccacca

SEQ ID NO: 279 - DNA, 30 bp, Artificial Sequence
  Description of Artificial Sequence: Synthetic oligonucleotide
ttgacaagcttttcctcagctccgtaaact

SEQ ID NO: 280 - DNA, 30 bp, Artificial Sequence
  Description of Artificial Sequence: Synthetic oligonucleotide
gtttatacataggcgagtactctgttatgg

SEQ ID NO: 281 - DNA, 30 bp, Artificial Sequence
  Description of Artificial Sequence: Synthetic oligonucleotide
agaggttccaactttcaccataatgaaaca

SEQ ID NO: 282 - DNA, 30 bp, Artificial Sequence
  Description of Artificial Sequence: Synthetic oligonucleotide
ggtttcaaaattgtgatctatatttaacaa

SEQ ID NO: 283 - DNA, 30 bp, Artificial Sequence; identical to SEQ ID NO: 282
  Description of Artificial Sequence: Synthetic oligonucleotide

SEQ ID NO: 284 - DNA, 30 bp, Artificial Sequence
  Description of Artificial Sequence: Synthetic oligonucleotide
tctattccaataaagaaatcttcctgcgtg

SEQ ID NO: 285 - DNA, 30 bp, Artificial Sequence
  Description of Artificial Sequence: Synthetic oligonucleotide
gaccgaatatatagtggaaacgtttagatg

SEQ ID NO: 286 - DNA, 30 bp, Artificial Sequence
  Description of Artificial Sequence: Synthetic oligonucleotide
ccacatcctgtttttaaccttaaaatggca

SEQ ID NO: 287 - DNA, 30 bp, Artificial Sequence
  Description of Artificial Sequence: Synthetic oligonucleotide
aattgcagtaggcatgacaaaatggactca

SEQ ID NO: 288 - DNA, 30 bp, Artificial Sequence
  Description of Artificial Sequence: Synthetic oligonucleotide
caagcttttcctttataatagaatgaatga

SEQ ID NO: 289 - DNA, 30 bp, Artificial Sequence
  Description of Artificial Sequence: Synthetic oligonucleotide
tctaagctagtgtattttgcgtttaatagt

SEQ ID NO: 290 - DNA, 30 bp, Artificial Sequence
  Description of Artificial Sequence: Synthetic oligonucleotide
aatgggctcgtgttgtacaataaatgtagt

SEQ ID NO: 291 - DNA, 30 bp, Artificial Sequence
  Description of Artificial Sequence: Synthetic oligonucleotide
aaaaatgggctcgtgttgtacaataaatgt

SEQ ID NO: 292 - DNA, 30 bp, Artificial Sequence
  Description of Artificial Sequence: Synthetic oligonucleotide
aaaaaaagcgcgcgattatgtaaaatataa

SEQ ID NO: 293 - DNA, 30 bp, Artificial Sequence
  Description of Artificial Sequence: Synthetic oligonucleotide
atccttatcgttatgggtattgtttgtaat

SEQ ID NO: 294 - DNA, 30 bp, Artificial Sequence
  Description of Artificial Sequence: Synthetic oligonucleotide
taaaagaattgtgagcgggaatacaacaac

SEQ ID NO: 295 - DNA, 30 bp, Artificial Sequence; identical to SEQ ID NO: 292
  Description of Artificial Sequence: Synthetic oligonucleotide

SEQ ID NO: 296 - DNA, 30 bp, Artificial Sequence
  Description of Artificial Sequence: Synthetic oligonucleotide
agggaatacaagctacttgttctttttgca

SEQ ID NO: 297 - DNA, 23 bp, Artificial Sequence
  Description of Artificial Sequence: Synthetic oligonucleotide
taatacgactcactatagggaga

SEQ ID NO: 298 - DNA, 28 bp, Artificial Sequence
  Description of Artificial Sequence: Synthetic oligonucleotide
gaatttaatacgactcactatagggaga

SEQ ID NO: 299 - DNA, 19 bp, Artificial Sequence
  Description of Artificial Sequence: Synthetic oligonucleotide
taatacgactcactatagg

SEQ ID NO: 300 - DNA, 30 bp, Artificial Sequence
  Description of Artificial Sequence: Synthetic oligonucleotide
gagtcgtattaatacgactcactatagggg

SEQ ID NO: 301 - DNA, 30 bp, Artificial Sequence
  Description of Artificial Sequence: Synthetic oligonucleotide
agtgagtcgtactacgactcactatagggg

SEQ ID NO: 302 - DNA, 30 bp, Artificial Sequence
  Description of Artificial Sequence: Synthetic oligonucleotide
gagtcgtattaatacgactctctatagggg

SEQ ID NO: 303 - DNA, 18 bp, Artificial Sequence
  Description of Artificial Sequence: Synthetic oligonucleotide
taatacgactcactatag

SEQ ID NO: 304 - DNA, 23 bp, Artificial Sequence
  Description of Artificial Sequence: Synthetic oligonucleotide
taatacgactcactatagggaga

SEQ ID NO: 305 - DNA, 23 bp, Artificial Sequence
  Description of Artificial Sequence: Synthetic oligonucleotide
ttatacgactcactatagggaga

SEQ ID NO: 306 - DNA, 23 bp, Artificial Sequence
  Description of Artificial Sequence: Synthetic oligonucleotide
gaatacgactcactatagggaga

SEQ ID NO: 307 - DNA, 23 bp, Artificial Sequence
  Description of Artificial Sequence: Synthetic oligonucleotide
taatacgtctcactatagggaga

SEQ ID NO: 308 - DNA, 23 bp, Artificial Sequence
  Description of Artificial Sequence: Synthetic oligonucleotide
tcatacgactcactatagggaga

SEQ ID NO: 309 - DNA, 30 bp, Artificial Sequence
  Description of Artificial Sequence: Synthetic oligonucleotide
taatacgactcactatagggagaccacaac

SEQ ID NO: 310 - DNA, 30 bp, Artificial Sequence
  Description of Artificial Sequence: Synthetic oligonucleotide
taattgaactcactaaagggagaccacagc

SEQ ID NO: 311 - DNA, 30 bp, Artificial Sequence
  Description of Artificial Sequence: Synthetic oligonucleotide
cgaagtaatacgactcactattagggaaga

SEQ ID NO: 312 - DNA, 19 bp, Artificial Sequence
  Description of Artificial Sequence: Synthetic oligonucleotide
atttaggtgacactataga

SEQ ID NO: 313 - DNA, 30 bp, Artificial Sequence
  Description of Artificial Sequence: Synthetic oligonucleotide
tacaaaataattcccctgcaaacattatca

SEQ ID NO: 314 - DNA, 30 bp, Artificial Sequence
  Description of Artificial Sequence: Synthetic oligonucleotide
tacaaaataattcccctgcaaacattatcg

SEQ ID NO: 315 - DNA, 30 bp, Artificial Sequence
  Description of Artificial Sequence: Synthetic oligonucleotide
gatacaggatacagcggaaacaacttttaa

SEQ ID NO: 316 - DNA, 30 bp, Artificial Sequence
  Description of Artificial Sequence: Synthetic oligonucleotide
tttcaagctataccaagcatacaatcaact

SEQ ID NO: 317 - DNA, 30 bp, Artificial Sequence
  Description of Artificial Sequence: Synthetic oligonucleotide
cctttgcagcataaattactatacttctat

SEQ ID NO: 318 - DNA, 30 bp, Artificial Sequence; identical to SEQ ID NO: 317
  Description of Artificial Sequence: Synthetic oligonucleotide

SEQ ID NO: 319 - DNA, 30 bp, Artificial Sequence; identical to SEQ ID NO: 317
  Description of Artificial Sequence: Synthetic oligonucleotide

SEQ ID NO: 320 - DNA, 30 bp, Artificial Sequence; identical to SEQ ID NO: 317
  Description of Artificial Sequence: Synthetic oligonucleotide

SEQ ID NO: 321 - DNA, 30 bp, Artificial Sequence; identical to SEQ ID NO: 317
  Description of Artificial Sequence: Synthetic oligonucleotide

SEQ ID NO: 322 - DNA, 30 bp, Artificial Sequence
  Description of Artificial Sequence: Synthetic oligonucleotide
ttatctactttttacaacaaatataaaaca

SEQ ID NO: 323 - DNA, 30 bp, Artificial Sequence
  Description of Artificial Sequence: Synthetic oligonucleotide
acaaacacaaatacacacactaaattaata

SEQ ID NO: 324 - DNA, 30 bp, Artificial Sequence
  Description of Artificial Sequence: Synthetic oligonucleotide
gtttcgaataaacacacataaacaaacaaa

SEQ ID NO: 325 - DNA, 30 bp, Artificial Sequence
  Description of Artificial Sequence: Synthetic oligonucleotide
ccaagcatacaatcaactatctcatataca

SEQ ID NO: 326 - DNA, 30 bp, Artificial Sequence
  Description of Artificial Sequence: Synthetic oligonucleotide
accatcaaaggaagctttaatcttctcata

SEQ ID NO: 327 - DNA, 30 bp, Artificial Sequence; identical to SEQ ID NO: 323
  Description of Artificial Sequence: Synthetic oligonucleotide

SEQ ID NO: 328 - DNA, 30 bp, Artificial Sequence; identical to SEQ ID NO: 325
  Description of Artificial Sequence: Synthetic oligonucleotide

SEQ ID NO: 329 - DNA, 30 bp, Artificial Sequence
  Description of Artificial Sequence: Synthetic oligonucleotide
agaacccactgcttactggcttatcgaaat

SEQ ID NO: 330 - DNA, 30 bp, Artificial Sequence
  Description of Artificial Sequence: Synthetic oligonucleotide
ggccgtttttggcttttttgttagacgaag

SEQ ID NO: 331 - DNA, 66 bp, Artificial Sequence
  Description of Artificial Sequence: Synthetic oligonucleotide
ataagtgccttcccatcaaaaaaatattctcaacataaaaaactttgtgtaatacttgtaacgcta

SEQ ID NO: 332 - DNA, 52 bp, Artificial Sequence
  Description of Artificial Sequence: Synthetic oligonucleotide
aaaaagagtattgacttcgcatctttttgtacctataatagattcattgcta

SEQ ID NO: 333 - DNA, 59 bp, Artificial Sequence
  Description of Artificial Sequence: Synthetic oligonucleotide
ggaaaatttttttaaaaaaaaaactttacagctagctcagtcctaggtattatgctagc

SEQ ID NO: 334 - DNA, 59 bp, Artificial Sequence
  Description of Artificial Sequence: Synthetic oligonucleotide
ggaaaatttttttaaaaaaaaaactttacggctagctcagccctaggtattatgctagc

SEQ ID NO: 335 - DNA, 64 bp, Artificial Sequence
  Description of Artificial Sequence: Synthetic oligonucleotide
ggaaaatttttttaaaaaaaaaacttgacagctagctcagtccttggtataatgctagcacgaa

SEQ ID NO: 336 - DNA, 28 bp, Artificial Sequence
  Description of Artificial Sequence: Synthetic oligonucleotide
  modified_base (13)..(15): a, c, t, g, unknown or other
  modified_base (18)..(20): a, c, t, g, unknown or other
tctagagaaagannngannnactagatg

SEQ ID NO: 337 - DNA, 28 bp, Artificial Sequence
  Description of Artificial Sequence: Synthetic oligonucleotide
tctagagaaagaggggacaaactagatg

SEQ ID NO: 338 - DNA, 28 bp, Artificial Sequence
  Description of Artificial Sequence: Synthetic oligonucleotide
tctagagaaagacaggacccactagatg

SEQ ID NO: 339 - DNA, 28 bp, Artificial Sequence
  Description of Artificial Sequence: Synthetic oligonucleotide
tctagagaaagatccgatgtactagatg

SEQ ID NO: 340 - DNA, 28 bp, Artificial Sequence
  Description of Artificial Sequence: Synthetic oligonucleotide
tctagagaaagattagacaaactagatg

SEQ ID NO: 341 - DNA, 28 bp, Artificial Sequence
  Description of Artificial Sequence: Synthetic oligonucleotide
tctagagaaagaagggacagactagatg

SEQ ID NO: 342 - DNA, 28 bp, Artificial Sequence
  Description of Artificial Sequence: Synthetic oligonucleotide
tctagagaaagacatgacgtactagatg

SEQ ID NO: 343 - DNA, 28 bp, Artificial Sequence
  Description of Artificial Sequence: Synthetic oligonucleotide
tctagagaaagataggagacactagatg

SEQ ID NO: 344 - DNA, 28 bp, Artificial Sequence
  Description of Artificial Sequence: Synthetic oligonucleotide
tctagagaaagaagagactcactagatg

SEQ ID NO: 345 - DNA, 28 bp, Artificial Sequence
  Description of Artificial Sequence: Synthetic oligonucleotide
tctagagaaagacgagatatactagatg

SEQ ID NO: 346 - DNA, 28 bp, Artificial Sequence
  Description of Artificial Sequence: Synthetic oligonucleotide
tctagagaaagactggagacactagatg

SEQ ID NO: 347 - DNA, 28 bp, Artificial Sequence
  Description of Artificial Sequence: Synthetic oligonucleotide
tctagagaaagaggcgaattactagatg

SEQ ID NO: 348 - DNA, 28 bp, Artificial Sequence
  Description of Artificial Sequence: Synthetic oligonucleotide
tctagagaaagaggcgatacactagatg

SEQ ID NO: 349 - DNA, 28 bp, Artificial Sequence
  Description of Artificial Sequence: Synthetic oligonucleotide
tctagagaaagaggtgacatactagatg

SEQ ID NO: 350 - DNA, 28 bp, Artificial Sequence
  Description of Artificial Sequence: Synthetic oligonucleotide
tctagagaaagagtggaaaaactagatg

SEQ ID NO: 351 - DNA, 28 bp, Artificial Sequence
  Description of Artificial Sequence: Synthetic oligonucleotide
tctagagaaagatgagaagaactagatg

SEQ ID NO: 352 - DNA, 28 bp, Artificial Sequence
  Description of Artificial Sequence: Synthetic oligonucleotide
tctagagaaagaagggatacactagatg

SEQ ID NO: 353 - DNA, 28 bp, Artificial Sequence
  Description of Artificial Sequence: Synthetic oligonucleotide
tctagagaaagacatgaggcactagatg

SEQ ID NO: 354 - DNA, 28 bp, Artificial Sequence
  Description of Artificial Sequence: Synthetic oligonucleotide
tctagagaaagacatgagttactagatg

SEQ ID NO: 355 - DNA, 28 bp, Artificial Sequence
  Description of Artificial Sequence: Synthetic oligonucleotide
tctagagaaagagacgaatcactagatg

SEQ ID NO: 356 - DNA, 28 bp, Artificial Sequence
  Description of Artificial Sequence: Synthetic oligonucleotide
tctagagaaagatttgatatactagatg

SEQ ID NO: 357 - DNA, 28 bp, Artificial Sequence
  Description of Artificial Sequence: Synthetic oligonucleotide
tctagagaaagacgcgagaaactagatg

SEQ ID NO: 358 - DNA, 28 bp, Artificial Sequence
  Description of Artificial Sequence: Synthetic oligonucleotide
tctagagaaagagacgagtcactagatg

SEQ ID NO: 359 - DNA, 28 bp, Artificial Sequence
  Description of Artificial Sequence: Synthetic oligonucleotide
tctagagaaagagaggagccactagatg

SEQ ID NO: 360 - DNA, 28 bp, Artificial Sequence
  Description of Artificial Sequence: Synthetic oligonucleotide
tctagagaaagagatgactaactagatg

SEQ ID NO: 361 - DNA, 28 bp, Artificial Sequence
  Description of Artificial Sequence: Synthetic oligonucleotide
tctagagaaagagccgacatactagatg

SEQ ID NO: 362 - DNA, 28 bp, Artificial Sequence
  Description of Artificial Sequence: Synthetic oligonucleotide
tctagagaaagagccgagttactagatg

SEQ ID NO: 363 - DNA, 28 bp, Artificial Sequence
  Description of Artificial Sequence: Synthetic oligonucleotide
tctagagaaagaggtgactcactagatg

SEQ ID NO: 364 - DNA, 28 bp, Artificial Sequence
  Description of Artificial Sequence: Synthetic oligonucleotide
tctagagaaagagtggaactactagatg

SEQ ID NO: 365 - DNA, 28 bp, Artificial Sequence
  Description of Artificial Sequence: Synthetic oligonucleotide
tctagagaaagataggactcactagatg

SEQ ID NO: 366 - DNA, 28 bp, Artificial Sequence
  Description of Artificial Sequence: Synthetic oligonucleotide
tctagagaaagattggacgtactagatg

SEQ ID NO: 367 - DNA, 28 bp, Artificial Sequence
  Description of Artificial Sequence: Synthetic oligonucleotide
tctagagaaagaaacgacatactagatg

SEQ ID NO: 368 - DNA, 28 bp, Artificial Sequence
  Description of Artificial Sequence: Synthetic oligonucleotide
tctagagaaagaaccgaattactagatg

SEQ ID NO: 369 - DNA, 28 bp, Artificial Sequence
  Description of Artificial Sequence: Synthetic oligonucleotide
tctagagaaagacaggattaactagatg

SEQ ID NO: 370 - DNA, 28 bp, Artificial Sequence
  Description of Artificial Sequence: Synthetic oligonucleotide
tctagagaaagacccgagacactagatg

SEQ ID NO: 371 - DNA, 28 bp, Artificial Sequence
  Description of Artificial Sequence: Synthetic oligonucleotide
tctagagaaagaccggaaatactagatg

SEQ ID NO: 372 - DNA, 28 bp, Artificial Sequence
  Description of Artificial Sequence: Synthetic oligonucleotide
tctagagaaagaccggagacactagatg

SEQ ID NO: 373 - DNA, 28 bp, Artificial Sequence
  Description of Artificial Sequence: Synthetic oligonucleotide
tctagagaaagagctgagcaactagatg

SEQ ID NO: 374 - DNA, 28 bp, Artificial Sequence
  Description of Artificial Sequence: Synthetic oligonucleotide
tctagagaaagagtagatcaactagatg

SEQ ID NO: 375 - DNA, 28 bp, Artificial Sequence
  Description of Artificial Sequence: Synthetic oligonucleotide
tctagagaaagatatgaataactagatg

SEQ ID NO: 376 - DNA, 28 bp, Artificial Sequence
  Description of Artificial Sequence: Synthetic oligonucleotide
tctagagaaagattagagtcactagatg

SEQ ID NO: 377 - DNA, 31 bp, Artificial Sequence
  Description of Artificial Sequence: Synthetic oligonucleotide
tctagagttcacacaggaaacctactagatg

SEQ ID NO: 378 - DNA, 31 bp, Artificial Sequence
  Description of Artificial Sequence: Synthetic oligonucleotide
tctagagattaaagaggagaaatactagatg

SEQ ID NO: 379 - DNA, 30 bp, Artificial Sequence
  Description of Artificial Sequence: Synthetic oligonucleotide
tctagagtcacacaggaaacctactagatg

SEQ ID NO: 380 - DNA, 29 bp, Artificial Sequence
  Description of Artificial Sequence: Synthetic oligonucleotide
tctagagtcacacaggaaagtactagatg

SEQ ID NO: 381 - DNA, 27 bp, Artificial Sequence
  Description of Artificial Sequence: Synthetic oligonucleotide
tctagagtcacacaggactactagatg

SEQ ID NO: 382 - DNA, 28 bp, Artificial Sequence
  Description of Artificial Sequence: Synthetic oligonucleotide
tctagagaaagaggagaaatactagatg

SEQ ID NO: 383 - DNA, 30 bp, Artificial Sequence
  Description of Artificial Sequence: Synthetic oligonucleotide
tctagagattaaagaggagaatactagatg

SEQ ID NO: 384 - DNA, 28 bp, Artificial Sequence
  Description of Artificial Sequence: Synthetic oligonucleotide
tctagagaaagaggggaaatactagatg

SEQ ID NO: 385 - protein, 21 aa, Artificial Sequence
  Description of Artificial Sequence: Synthetic peptide
MKQSTIALALLPLLFTPVTKA

SEQ ID NO: 386 - protein, 20 aa, Artificial Sequence
  Description of Artificial Sequence: Synthetic peptide
KQSTIALALLPLLFTPVTKA

SEQ ID NO: 387 - protein, 22 aa, Artificial Sequence
  Description of Artificial Sequence: Synthetic peptide
MMKRNILAVIVPALLVAGTANA

SEQ ID NO: 388 - protein, 15 aa, Artificial Sequence
  Description of Artificial Sequence: Synthetic peptide
MRTLTLNELDSVSGG

SEQ ID NO: 389 - protein, 43 aa, Artificial Sequence
  Description of Artificial Sequence: Synthetic polypeptide
MNNNDLFQASRRRFLAQLGGLTVAGMLGTSLLTPRRATAAQAA

SEQ ID NO: 390 - protein, 33 aa, Artificial Sequence
  Description of Artificial Sequence: Synthetic polypeptide
MDVSRRQFFKICAGGMAGTTVAALGFAPKQALA

SEQ ID NO: 391 - protein, 45 aa, Artificial Sequence
  Description of Artificial Sequence: Synthetic polypeptide
MKTKIPDAVLAAEVSRRGLVKTTAIGGLAMASSALTLPFSRIAHA

SEQ ID NO: 392 - protein, 21 aa, Artificial Sequence
  Description of Artificial Sequence: Synthetic peptide
KYLLPTAAAGLLLLAAQPAMA

SEQ ID NO: 393 - protein, 52 aa, Artificial Sequence
  Description of Artificial Sequence: Synthetic polypeptide
LNPLINEISKIISAAGNFDVKEERAAASLLQLSGNASDFSYGRNSITLTASA

SEQ ID NO: 394 - DNA, 159 bp, Artificial Sequence
  Description of Artificial Sequence: Synthetic polynucleotide
cttaatccattaattaatgaaatcagcaaaatcatttcagctgcaggtaattttgatgttaaagaggaaagagctgcagcttctttattgcagttgtccggtaatgccagtgatttttcatatggacggaactcaataactttgacagcatcagcataa

SEQ ID NO: 395 - protein, 52 aa, Artificial Sequence
  Description of Artificial Sequence: Synthetic polypeptide
MKRHLNTSYRLVWNHITGAFVVASELARARGKRAGVAVALSLAAATSLPALA

SEQ ID NO: 396 - protein, 40 aa, Artificial Sequence
  Description of Artificial Sequence: Synthetic polypeptide
MFWRDMTLSVWRKKTTGLKTKKRLLALVLAAALCSSPVWA

SEQ ID NO: 397 - protein, 33 aa, Artificial Sequence
  Description of Artificial Sequence: Synthetic polypeptide
MGYKMNISSLRKAFIFMGAVAALSLVNAQSALA

SEQ ID NO: 398 - protein, 53 aa, Artificial Sequence
  Description of Artificial Sequence: Synthetic polypeptide
MNKIFKVIWNPATGSYTVASETAKSRGKKSGRSKLLISALVAGGLLSSFGASA

SEQ ID NO: 399 - DNA, 7878 bp, Artificial Sequence
  Description of Artificial Sequence: Synthetic polynucleotide
atggatttaaattctaaaaaatatcagatgcttaaagagctatatgtaagcttcgctgaaaatgaagttaaacctttagcaacagaacttgatgaagaagaaagatttccttatgaaacagtggaaaaaatggcaaaagcaggaatgatgggtataccatatccaaaagaatatggtggagaaggtggagacactgtaggatatataatggcagttgaagaattgtctagagtttgtggtactacaggagttatattatcagctcatacatctcttggctcatggcctatatatcaatatggtaatgaagaacaaaaacaaaaattcttaagaccactagcaagtggagaaaaattaggagcatttggtcttactgagcctaatgctggtacagatgcgtctggccaacaaacaactgctgttttagacggggatgaatacatacttaatggctcaaaaatatttataacaaacgcaatagctggtgacatatatgtagtaatggcaatgactgataaatctaaggggaacaaaggaatatcagcatttatagttgaaaaaggaactcctgggtttagctttggagttaaagaaaagaaaatgggtataagaggttcagctacgagtgaattaatatttgaggattgcagaatacctaaagaaaatttacttggaaaagaaggtcaaggatttaagatagcaatgtctactcttgatggtggtagaattggtatagctgcacaagctttaggtttagcacaaggtgctcttgatgaaactgttaaatatgtaaaagaaagagtacaatttggtagaccattatcaaaattccaaaatacacaattccaattagctgatatggaagttaaggtacaagcggctagacaccttgtatatcaagcagctataaataaagacttaggaaaaccttatggagtagaagcagcaatggcaaaattatttgcagctgaaacagctatggaagttactacaaaagctgtacaacttcatggaggatatggatacactcgtgactatccagtagaaagaatgatgagagatgctaagataactgaaatatatgaaggaactagtgaagttcaaagaatggttatttcaggaaaactattaaaatagtaagaaggagatatacatatggaggaaggatttatgaatatagtcgtttgtataaaacaagttccagatacaacagaagttaaactagatcctaatacaggtactttaattagagatggagtaccaagtataataaaccctgatgataaagcaggtttagaagaagctataaaattaaaagaagaaatgggtgctcatgtaactgttataacaatgggacctcctcaagcagatatggctttaaaagaagctttagcaatgggtgcagatagaggtatattattaacagatagagcatttgcgggtgctgatacttgggcaacttcatcagcattagcaggagcattaaaaaatatagattttgatattataatagctggaagacaggcgatagatggagatactgcacaagttggacctcaaatagctgaacatttaaatcttccatcaataacatatgctgaagaaataaaaactgaaggtgaatatgtattagtaaaaagacaatttgaagattgttgccatgacttaaaagttaaaatgccatgccttataacaactcttaaagatatgaacacaccaagatacatgaaagttggaagaatatatgatgctttcgaaaatgatgtagtagaaacatggactgtaaaagatatagaagttgacccttctaatttaggtcttaaaggttctccaactagtgtatttaaatcatttacaaaatcagttaaaccagctggtacaatatacaatgaagatgcgaaaacatcagctggaattatcatagataaattaaaagagaagtatatcatataataagaaggagatatacatatgggtaacgttttagtagtaatagaacaaagagaaaatgtaattcaaactgtttctttagaattactaggaaaggctacagaaatagcaaaagattatgatacaaaagtttctgcattacttttaggtagtaaggtagaaggtttaatagatacattagcacactatggtgcagatgaggtaatagtagtagatgatgaagctttagcagtgtatacaactgaaccatatacaaaagcagcttatgaagcaataaaagcagctgaccctatagttgtattatttggtgcaacttcaataggtagagatttagcgcctagagtttctgctagaatacatacaggtcttactgctgactgtacaggtcttgcagtagctgaagatacaaaattattattaatgacaagacctgcctttggtggaaatataatggcaacaatagtttgtaaagatttcagacctcaaatgtctacagttagaccaggggttatgaagaaaaatgaacctgatgaaactaaagaagctgtaattaaccgtttcaaggtagaatttaatgatgctgataaattagttcaagttgtacaagtaataaaagaagctaaaaaacaagttaaaatagaagatgctaagatattagtttctgctggacgtggaatgggtggaaaagaaaacttagacatactttatgaattagctgaaattataggtggagaagtttctggttctcgtgccactatagatgcaggttggttagataaagcaagacaagttggtcaaactggtaaaactgtaagaccagacctttatatagcatgtggtatatctggagcaatacaacatatagctggtatggaagatgctgagtttatagttgctataaataaaaatccagaagctccaatatttaaatatgctgatgttggtatagttggagatgttcataaagtgcttccagaacttatcagtcagttaagtgttgcaaaagaaaaaggtgaagttttagctaactaataagaaggagatatacatatgagagaagtagtaattgccagtgcagctagaacagcagtaggaagttttggaggagcatttaaatcagtttcagcggtagagttaggggtaacagcagctaaagaagctataaaaagagctaacataactccagatatgatagatgaatctcttttagggggagtacttacagcaggtcttggacaaaatatagcaagacaaatagcattaggagcaggaataccagtagaaaaaccagctatgactataaatatagtttgtggttctggattaagatctgtttcaatggcatctcaacttatagcattaggtgatgctgatataatgttagttggtggagctgaaaacatgagtatgtctccttatttagtaccaagtgcgagatatggtgcaagaatgggtgatgctgcttttgttgattcaatgataaaagatggattatcagacatatttaataactatcacatgggtattactgctgaaaacatagcagagcaatggaatataactagagaagaacaagatgaattagctcttgcaagtcaaaataaagctgaaaaagctcaagctgaaggaaaatttgatgaagaaatagttcctgttgttataaaaggaagaaaaggtgacactgtagtagataaagatgaatatattaagcctggcactacaatggagaaacttgctaagttaagacctgcatttaaaaaagatggaacagttactgctggtaatgcatcaggaataaatgatggtgctgctatgttagtagtaatggctaaagaaaaagctgaagaactaggaatagagcctcttgcaactatagtttcttatggaacagctggtgttgaccctaaaataatgggatatggaccagttccagcaactaaaaaagctttagaagctgctaatatgactattgaagatatagatttagttgaagctaatgaggcatttgctgcccaatctgtagctgtaataagagacttaaatatagatatgaataaagttaatgttaatggtggagcaatagctataggacatccaataggatgctcaggagcaagaatacttactacacttttatatgaaatgaagagaagagatgctaaaactggtcttgctacactttgtataggcggtggaatgggaactactttaatagttaagagatagtaagaaggagatatacatatgaaattagctgtaataggtagtggaactatgggaagtggtattgtacaaacttttgcaagttgtggacatgatgtatgtttaaagagtagaactcaaggtgctatagataaatgtttagctttattagataaaaatttaactaagttagttactaagggaaaaatggatgaagctacaaaagcagaaatattaagtcatgttagttcaactactaattatgaagatttaaaagatatggatttaataatagaagcatctgtagaagacatgaatataaagaaagatgttttcaagttactagatgaattatgtaaagaagatactatcttggcaacaaatacttcatcattatctataacagaaatagcttcttctactaagcgcccagataaagttataggaatgcatttctttaatccagttcctatgatgaaattagttgaagttataagtggtcagttaacatcaaaagttacttttgatacagtatttgaattatctaagagtatcaataaagtaccagtagatgtatctgaatctcctggatttgtagtaaatagaatacttatacctatgataaatgaagctgttggtatatatgcagatggtgttgcaagtaaagaagaaatagatgaagctatgaaattaggagcaaaccatccaatgggaccactagcattaggtgatttaatcggattagatgttgttttagctataatgaacgttttatatactgaatttggagatactaaatatagacctcatccacttttagctaaaatggttagagctaatcaattaggaagaaaaactaagataggattctatgattataataaataataagaaggagatatacatatgagtacaagtgatgttaaagtttatgagaatgtagctgttgaagtagatggaaatatatgtacagtgaaaatgaatagacctaaagcccttaatgcaataaattcaaagactttagaagaactttatgaagtatttgtagatattaataatgatgaaactattgatgttgtaatattgacaggggaaggaaaggcatttgtagctggagcagatattgcatacatgaaagatttagatgctgtagctgctaaagattttagtatcttaggagcaaaagcttttggagaaatagaaaatagtaaaaaagtagtgatagctgctgtaaacggatttgctttaggtggaggatgtgaacttgcaatggcatgtgatataagaattgcatctgctaaagctaaatttggtcagccagaagtaactcttggaataactccaggatatggaggaactcaaaggcttacaagattggttggaatggcaaaagcaaaagaattaatctttacaggtcaagttataaaagctgatgaagctgaaaaaatagggctagtaaatagagtcgttgagccagacattttaatagaagaagttgagaaattagctaagataatagctaaaaatgctcagcttgcagttagatactctaaagaagcaatacaacttggtgctcaaactgatataaatactggaatagatatagaatctaatttatttggtctttgtttttcaactaaagaccaaaaagaaggaatgtcagctttcgttgaaaagagagaagctaactttataaaagggtaataagaaggagatatacatatgagaagttttgaagaagtaattaagtttgcaaaagaaagaggacctaaaactatatcagtagcatgttgccaagataaagaagttttaatggcagttgaaatggctagaaaagaaaaaatagcaaatgccattttagtaggagatatagaaaagactaaagaaattgcaaaaagcatagacatggatatcgaaaattatgaactgatagatataaaagatttagcagaagcatctctaaaatctgttgaattagtttcacaaggaaaagccgacatggtaatgaaaggcttagtagacacatcaataatactaaaagcagttttaaataaagaagtaggtcttagaactggaaatgtattaagtcacgtagcagtatttgatgtagagggatatgatagattatttttcgtaactgacgcagctatgaacttagctcctgatacaaatactaaaaagcaaatcatagaaaatgcttgcacagtagcacattcattagatataagtgaaccaaaagttgctgcaatatgcgcaaaagaaaaagtaaatccaaaaatgaaagatacagttgaagctaaagaactagaagaaatgtatgaaagaggagaaatcaaaggttgtatggttggtgggccttttgcaattgataatgcagtatctttagaagcagctaaacataaaggtataaatcatcctgtagcaggacgagctgatatattattagccccagatattgaaggtggtaacatattatataaagctttggtattcttctcaaaatcaaaaaatgcaggagttatagttggggctaaagcaccaataatattaacttctagagcagacagtgaagaaactaaactaaactcaatagctttaggtgttttaatggcagcaaaggcataataagaaggagatatacatatgagcaaaatatttaaaatcttaacaataaatcctggttcgacatcaactaaaatagctgtatttgataatgaggatttagtatttgaaaaaactttaagacattcttcagaagaaataggaaaatatgagaaggtgtctgaccaatttgaatttcgtaaacaagtaatagaagaagctctaaaagaaggtggagtaaaaacatctgaattagatgctgtagtaggtagaggaggacttcttaaacctataaaaggtggtacttattcagtaagtgctgctatgattgaagatttaaaagtgggagttttaggagaacacgcttcaaacctaggtggaataatagcaaaacaaataggtgaagaagtaaatgttccttcatacatagtagaccctgttgttgtagatgaattagaagatgttgctagaatttctggtatgcctgaaataagtagagcaagtgtagtacatgctttaaatcaaaaggcaatagcaagaagatatgctagagaaataaacaagaaatatgaagatataaatcttatagttgcacacatgggtggaggagtttctgttggagctcataaaaatggtaaaatagtagatgttgcaaacgcattagatggagaaggacctttctctccagaaagaagtggtggactaccagtaggtgcattagtaaaaatgtgctttagtggaaaatatactcaagatgaaattaaaaagaaaataaaaggtaatggcggactagttgcatacttaaacactaatgatgctagagaagttgaagaaagaattgaagctggtgatgaaaaagctaaattagtatatgaagctatggcatatcaaatctctaaagaaataggagctagtgctgcagttcttaagggagatgtaaaagcaatattattaactggtggaatcgcatattcaaaaatgtttacagaaatgattgcagatagagttaaatttatagcagatgtaaaagtttatccaggtgaagatgaaatgattgcattagctcaaggtggacttagagttttaactggtgaagaagaggctcaagtttatgataactaataa

SEQ ID NO: 400 - DNA, 6090 bp, Artificial Sequence
  Description of Artificial Sequence: Synthetic polynucleotide
atgatcgtaaaacctatggtacgcaacaatatctgcctgaacgcccatcctcagggctgcaagaagggagtggaagatcagattgaatataccaagaaacgcattaccgcagaagtcaaagctggcgcaaaagctccaaaaaacgttctggtgcttggctgctcaaatggttacggcctggcgagccgcattactgctgcgttcggatacggggctgcgaccatcggcgtgtcctttgaaaaagcgggttcagaaaccaaatatggtacaccgggatggtacaataatttggcatttgatgaagcggcaaaacgcgagggtctttatagcgtgacgatcgacggcgatgcgttttcagacgagatcaaggcccaggtaattgaggaagccaaaaaaaaaggtatcaaatttgatctgatcgtatacagcttggccagcccagtacgtactgatcctgatacaggtatcatgcacaaaagcgttttgaaaccctttggaaaaacgttcacaggcaaaacagtagatccgtttactggcgagctgaaggaaatctccgcggaaccagcaaatgacgaggaagcagccgccactgttaaagttatggggggtgaagattgggaacgttggattaagcagctgtcgaaggaaggcctcttagaagaaggctgtattaccttggcctatagttatattggccctgaagctacccaagctttgtaccgtaaaggcacaatcggcaaggccaaagaacacctggaggccacagcacaccgtctcaacaaagagaacccgtcaatccgtgccttcgtgagcgtgaataaaggcctggtaacccgcgcaagcgccgtaatcccggtaatccctctgtatctcgccagcttgttcaaagtaatgaaagagaagggcaatcatgaaggttgtattgaacagatcacgcgtctgtacgccgagcgcctgtaccgtaaagatggtacaattccagttgatgaggaaaatcgcattcgcattgatgattgggagttagaagaagacgtccagaaagcggtatccgcgttgatggagaaagtcacgggtgaaaacgcagaatctctcactgacttagcggggtaccgccatgatttcttagctagtaacggctttgatgtagaaggtattaattatgaagcggaagttgaacgcttcgaccgtatctgataagaaggagatatacatatgagagaagtagtaattgccagtgcagctagaacagcagtaggaagttttggaggagcatttaaatcagtttcagcggtagagttaggggtaacagcagctaaagaagctataaaaagagctaacataactccagatatgatagatgaatctcttttagggggagtacttacagcaggtcttggacaaaatatagcaagacaaatagcattaggagcaggaataccagtagaaaaaccagctatgactataaatatagtttgtggttctggattaagatctgtttcaatggcatctcaacttatagcattaggtgatgctgatataatgttagttggtggagctgaaaacatgagtatgtctccttatttagtaccaagtgcgagatatggtgcaagaatgggtgatgctgcttttgttgattcaatgataaaagatggattatcagacatatttaataactatcacatgggtattactgctgaaaacatagcagagcaatggaatataactagagaagaacaagatgaattagctcttgcaagtcaaaataaagctgaaaaagctcaagctgaaggaaaatttgatgaagaaatagttcctgttgttataaaaggaagaaaaggtgacactgtagtagataaagatgaatatattaagcctggcactacaatggagaaacttgctaagttaagacctgcatttaaaaaagatggaacagttactgctggtaatgcatcaggaataaatgatggtgctgctatgttagtagtaatggctaaagaaaaagctgaagaactaggaatagagcctcttgcaactatagtttcttatggaacagctggtgttgaccctaaaataatgggatatggaccagttccagcaactaaaaaagctttagaagctgctaatatgactattgaagatatagatttagttgaagctaatgaggcatttgctgcccaatctgtagctgtaataagagacttaaatatagatatgaataaagttaatgttaatggtggagcaatagctataggacatccaataggatgctcaggagcaagaatacttactacacttttatatgaaatgaagagaagagatgctaaaactggtcttgctacactttgtataggcggtggaatgggaactactttaatagttaagagatagtaagaaggagatatacatatgaaattagctgtaataggtagtggaactatgggaagtggtattgtacaaacttttgcaagttgtggacatgatgtatgtttaaagagtagaactcaaggtgctatagataaatgtttagctttattagataaaaatttaactaagttagttactaagggaaaaatggatgaagctacaaaagcagaaatattaagtcatgttagttcaactactaattatgaagatttaaaagatatggatttaataatagaagcatctgtagaagacatgaatataaagaaagatgttttcaagttactagatgaattatgtaaagaagatactatcttggcaacaaatacttcatcattatctataacagaaatagcttcttctactaagcgcccagataaagttataggaatgcatttctttaatccagttcctatgatgaaattagttgaagttataagtggtcagttaacatcaaaagttacttttgatacagtatttgaattatctaagagtatcaataaagtaccagtagatgtatctgaatctcctggatttgtagtaaatagaatacttatacctatgataaatgaagctgttggtatatatgcagatggtgttgcaagtaaagaagaaatagatgaagctatgaaattaggagcaaaccatccaatgggaccactagcattaggtgatttaatcggattagatgttgttttagctataatgaacgttttatatactgaatttggagatactaaatatagacctcatccacttttagctaaaatggttagagctaatcaattaggaagaaaaactaagataggattctatgattataataaataataagaaggagatatacatatgagtacaagtgatgttaaagtttatgagaatgtagctgttgaagtagatggaaatatatgtacagtgaaaatgaatagacctaaagcccttaatgcaataaattcaaagactttagaagaactttatgaagtatttgtagatattaataatgatgaaactattgatgttgtaatattgacaggggaaggaaaggcatttgtagctggagcagatattgcatacatgaaagatttagatgctgtagctgctaaagattttagtatcttaggagcaaaagcttttggagaaatagaaaatagtaaaaaagtagtgatagctgctgtaaacggatttgctttaggtggaggatgtgaacttgcaatggcatgtgatataagaattgcatctgctaaagctaaatttggtcagccagaagtaactcttggaataactccaggatatggaggaactcaaaggcttacaagattggttggaatggcaaaagcaaaagaattaatctttacaggtcaagttataaaagctgatgaagctgaaaaaatagggctagtaaatagagtcgttgagccagacattttaatagaagaagttgagaaattagctaagataatagctaaaaatgctcagcttgcagttagatactctaaagaagcaatacaacttggtgctcaaactgatataaatactggaatagatatagaatctaatttatttggtctttgtttttcaactaaagaccaaaaagaaggaatgtcagctttcgttgaaaagagagaagctaactttataaaagggtaataagaaggagatatacatatgagaagttttgaagaagtaattaagtttgcaaaagaaagaggacctaaaactatatcagtagcatgttgccaagataaagaagttttaatggcagttgaaatggctagaaaagaaaaaatagcaaatgccattttagtaggagatatagaaaagactaaagaaattgcaaaaagcatagacatggatatcgaaaattatgaactgatagatataaaagatttagcagaagcatctctaaaatctgttgaattagtttcacaaggaaaagccgacatggtaatgaaaggcttagtagacacatcaataatactaaaagcagttttaaataaagaagtaggtcttagaactggaaatgtattaagtcacgtagcagtatttgatgtagagggatatgatagattatttttcgtaactgacgcagctatgaacttagctcctgatacaaatactaaaaagcaaatcatagaaaatgcttgcacagtagcacattcattagatataagtgaaccaaaagttgctgcaatatgcgcaaaagaaaaagtaaatccaaaaatgaaagatacagttgaagctaaagaactagaagaaatgtatgaaagaggagaaatcaaaggttgtatggttggtgggccttttgcaattgataatgcagtatctttagaagcagctaaacataaaggtataaatcatcctgtagcaggacgagctgatatattattagccccagatattgaaggtggtaacatattatataaagctttggtattcttctcaaaatcaaaaaatgcaggagttatagttggggctaaagcaccaataatattaacttctagagcagacagtgaagaaactaaactaaactcaatagctttaggtgttttaatggcagcaaaggcataataagaaggagatatacatatgagcaaaatatttaaaatcttaacaataaatcctggttcgacatcaactaaaatagctgtatttgataatgaggatttagtatttgaaaaaactttaagacattcttcagaagaaataggaaaatatgagaaggtgtctgaccaatttgaatttcgtaaacaagtaatagaagaagctctaaaagaaggtggagtaaaaacatctgaattagatgctgtagtaggtagaggaggacttcttaaacctataaaaggtggtacttattcagtaagtgctgctatgattgaagatttaaaagtgggagttttaggagaacacgcttcaaacctaggtggaataatagcaaaacaaataggtgaagaagtaaatgttccttcatacatagtagaccctgttgttgtagatgaattagaagatgttgctagaatttctggtatgcctgaaataagtagagcaagtgtagtacatgctttaaatcaaaaggcaatagcaagaagatatgctagagaaataaacaagaaatatgaagatataaatcttatagttgcacacatgggtggaggagtttctgttggagctcataaaaatggtaaaatagtagatgttgcaaacgcattagatggagaaggacctttctctccagaaagaagtggtggactaccagtaggtgcattagtaaaaatgtgctttagtggaaaatatactcaagatgaaattaaaaagaaaataaaaggtaatggcggactagttgcatacttaaacactaatgatgctagagaagttgaagaaagaattgaagctggtgatgaaaaagctaaattagtatatgaagctatggcatatcaaatctctaaagaaataggagctagtgctgcagttcttaagggagatgtaaaagcaatattattaactggtggaatcgcatattcaaaaatgtttacagaaatgattgcagatagagttaaatttatagcagatgtaaaagtttatccaggtgaagatgaaatgattgcattagctcaaggtggacttagagttttaactggtgaagaagaggctcaagtttatgataactaataa

SEQ ID NO: 401 - DNA, 4947 bp, Artificial Sequence
  Description of Artificial Sequence: Synthetic polynucleotide
atgatcgtaaaacctatggtacgcaacaatatctgcctgaacgcccatcctcagggctgcaagaagggagtggaagatcagattgaatataccaagaaacgcattaccgcagaagtcaaagctggcgcaaaagctccaaaaaacgttctggtgcttggctgctcaaatggttacggcctggcgagccgcattactgctgcgttcggatacggggctgcgaccatcggcgtgtcctttgaaaaagcgggttcagaaaccaaatatggtacaccgggatggtacaataatttggcatttgatgaagcggcaaaacgcgagggtctttatagcgtgacgatcgacggcgatgcgttttcagacgagatcaaggcccaggtaattgaggaagccaaaaaaaaaggtatcaaatttgatctgatcgtatacagcttggccagcccagtacgtactgatcctgatacaggtatcatgcacaaaagcgttttgaaaccctttggaaaaacgttcacaggcaaaacagtagatccgtttactggcgagctgaaggaaatctccgcggaaccagcaaatgacgaggaagcagccgccactgttaaagttatggggggtgaagattgggaacgttggattaagcagctgtcgaaggaaggcctcttagaagaaggctgtattaccttggcctatagttatattggccctgaagctacccaagctttgtaccgtaaaggcacaatcggcaaggccaaagaacacctggaggccacagcacaccgtctcaacaaagagaacccgtcaatccgtgccttcgtgagcgtgaataaaggcctggtaacccgcgcaagcgccgtaatcccggtaatccctctgtatctcgccagcttgttcaaagtaatgaaagagaagggcaatcatgaaggttgtattgaacagatcacgcgtctgtacgccgagcgcctgtaccgtaaagatggtacaattccagttgatgaggaaaatcgcattcgcattgatgattgggagttagaagaagacgtccagaaagcggtatccgcgttgatggagaaagtcacgggtgaaaacgcagaatctctcactgacttagcggggtaccgccatgatttcttagctagtaacggctttgatgtagaaggtattaattatgaagcggaagttgaacgcttcgaccgtatctgataagaaggagatatacatatgagagaagtagtaattgccagtgcagctagaacagcagtaggaagttttggaggagcatttaaatcagtttcagcggtagagttaggggtaacagcagctaaagaagctataaaaagagctaacataactccagatatgatagatgaatctcttttagggggagtacttacagcaggtcttggacaaaatatagcaagacaaatagcattaggagcaggaataccagtagaaaaaccagctatgactataaatatagtttgtggttctggattaagatctgtttcaatggcatctcaacttatagcattaggtgatgctgatataatgttagttggtggagctgaaaacatgagtatgtctccttatttagtaccaagtgcgagatatggtgcaagaatgggtgatgctgcttttgttgattcaatgataaaagatggattatcagacatatttaataactatcacatgggtattactgctgaaaacatagcagagcaatggaatataactagagaagaacaagatgaattagctcttgcaagtcaaaataaagctgaaaaagctcaagctgaaggaaaatttgatgaagaaatagttcctgttgttataaaaggaagaaaaggtgacactgtagtagataaagatgaatatattaagcctggcactacaatggagaaacttgctaagttaagacctgcatttaaaaaagatggaacagttactgctggtaatgcatcaggaataaatgatggtgctgctatgttagtagtaatggctaaagaaaaagctgaagaactaggaatagagcctcttgcaactatagtttcttatggaacagctggtgttgaccctaaaataatgggatatggaccagttccagcaactaaaaaagctttagaagctgctaatatgactattgaagatatagatttagttgaagctaatgaggcatttgctgcccaatctgtagctgtaataagagacttaaatatagatatgaataaagttaatgttaatggtggagcaatagctataggacatccaataggatgctcaggagcaagaatacttactacacttttatatgaaatgaagagaagagatgctaaaactggtcttgctacactttgtataggcggtggaatgggaactactttaatagttaagagatagtaagaaggagatatacatatgaaattagctgtaataggtagtggaactatgggaagtggtattgtacaaacttttgcaagttgtggacatgatgtatgtttaaagagtagaactcaaggtgctatagataaatgtttagctttattagataaaaatttaactaagttagttactaagggaaaaatggatgaagctacaaaagcagaaatattaagtcatgttagttcaactactaattatgaagatttaaaagatatggatttaataatagaagcatctgtagaagacatgaatataaagaaagatgttttcaagttactagatgaattatgtaaagaagatactatcttggcaacaaatacttcatcattatctataacagaaatagcttcttctactaagcgcccagataaagttataggaatgcatttctttaatccagttcctatgatgaaattagttgaagttataagtggtcagttaacatcaaaagttacttttgatacagtatttgaattatctaagagtatcaataaagtaccagtagatgtatctgaatctcctggatttgtagtaaatagaatacttatacctatgataaatgaagctgttggtatatatgcagatggtgttgcaagtaaagaagaaatagatgaagctatgaaattaggagcaaaccatccaatgggaccactagcattaggtgatttaatcggattagatgttgttttagctataatgaacgttttatatactgaatttggagatactaaatatagacctcatccacttttagctaaaatggttagagctaatcaattaggaagaaaaactaagataggattctatgattataataaataataagaaggagatatacatatgagtacaagtgatgttaaagtttatgagaatgtagctgttgaagtagatggaaatatatgtacagtgaaaatgaatagacctaaagcccttaatgcaataaattcaaagactttagaagaactttatgaagtatttgtagatattaataatgatgaaactattgatgttgtaatattgacaggggaaggaaaggcatttgtagctggagcagatattgcatacatgaaagatttagatgctgtagctgctaaagattttagtatcttaggagcaaaagcttttggagaaatagaaaatagtaaaaaagtagtgatagctgctgtaaacggatttgctttaggtggaggatgtgaacttgcaatggcatgtgatataagaattgcatctgctaaagctaaatttggtcagccagaagtaactcttggaataactccaggatatggaggaactcaaaggcttacaagattggttggaatggcaaaagcaaaagaattaatctttacaggtcaagttataaaagctgatgaagctgaaaaaatagggctagtaaatagagtcgttgagccagacattttaatagaagaagttgagaaattagctaagataatagctaaaaatgctcagcttgcagttagatactctaaagaagcaatacaacttggtgctcaaactgatataaatactggaatagatatagaatctaatttatttggtctttgtttttcaactaaagaccaaaaagaaggaatgtcagctttcgttgaaaagagagaagctaactttataaaagggtaataagaaggagatatacatatgagtcaggcgctaaaaaatttactgacattgttaaatctggaaaaaattgaggaaggactctttcgcggccagagtgaagatttaggtttacgccaggtgtttggcggccaggtcgtgggtcaggccttgtatgctgcaaaagagaccgtccctgaagagcggctggtacattcgtttcacagctactttcttcgccctggcgatagtaagaagccgattatttatgatgtcgaaacgctgcgtgacggtaacagcttcagcgcccgccgggttgctgctattcaaaacggcaaaccgattttttatatgactgcctctttccaggcaccagaagcgggtttcgaacatcaaaaaacaatgccgtccgcgccagcgcctgatggcctcccttcggaaacgcaaatcgcccaatcgctggcgcacctgctgccgccagtgctgaaagataaattcatctgcgatcgtccgctggaagtccgtccggtggagtttcataacccactgaaaggtcacgtcgcagaaccacatcgtcaggtgtggatccgcgcaaatggtagcgtgccggatgacctgcgcgttcatcagtatctgctcggttacgcttctgatcttaacttcctgccggtagctctacagccgcacggcatcggttttctcgaaccggggattcagattgccaccattgaccattccatgtggttccatcgcccgtttaatttgaatgaatggctgctgtatagcgtggagagcacctcggcgtccagcgcacgtggctttgtgcgcggtgagttttatacccaagacggcgtactggttgcctcgaccgttcaggaaggggtgatgcgtaatcacaattaa

SEQ ID NO: 402 - DNA, 8575 bp, Artificial Sequence
  Description of Artificial Sequence: Synthetic polynucleotide
ttattatcgcaccgcaatcgggattttcgattcataaagcaggtcgtaggtcggcttgttgagcaggtcttgcagcgtgaaaccgtccagatacgtgaaaaacgacttcattgcaccgccgagtatgcccgtcagccggcaggacggcgtaatcaggcattcgttgttcgggcccatacactcgaccagctgcatcggttcgaggtggcggacgaccgcgccgatattgatgcgttcgggcggcgcggccagcctcagcccgccgcctttcccgcgtacgctgtgcaagaacccgcctttgaccagcgcggtaaccactttcatcaaatggcttttggaaatgccgtaggtcgaggcgatggtggcgatattgaccagcgcgtcgtcgttgacggcggtgtagatgaggacgcgcagcccgtagtcggtatgttgggtcagatacatacaacctccttagtacatgcaaaattatttctagagcaacatacgagccggaagcataaagtgtaaagcctggggtgcctaatgagttgagttgaggaattataacaggaagaaatattcctcatacgcttgtaattcctctatggttgttgacaattaatcatcggctcgtataatgtataacattcatattttgtgaattttaaactctagaaataattttgtttaactttaagaaggagatatacatatggatttaaattctaaaaaatatcagatgcttaaagagctatatgtaagcttcgctgaaaatgaagttaaacctttagcaacagaacttgatgaagaagaaagatttccttatgaaacagtggaaaaaatggcaaaagcaggaatgatgggtataccatatccaaaagaatatggtggagaaggtggagacactgtaggatatataatggcagttgaagaattgtctagagtttgtggtactacaggagttatattatcagctcatacatctcttggctcatggcctatatatcaatatggtaatgaagaacaaaaacaaaaattcttaagaccactagcaagtggagaaaaattaggagcatttggtcttactgagcctaatgctggtacagatgcgtctggccaacaaacaactgctgttttagacggggatgaatacatacttaatggctcaaaaatatttataacaaacgcaatagctggtgacatatatgtagtaatggcaatgactgataaatctaaggggaacaaaggaatatcagcatttatagttgaaaaaggaactcctgggtttagctttggagttaaagaaaagaaaatgggtataagaggttcagctacgagtgaattaatatttgaggattgcagaatacctaaagaaaatttacttggaaaagaaggtcaaggatttaagatagcaatgtctactcttgatggtggtagaattggtatagctgcacaagctttaggtttagcacaaggtgctcttgatgaaactgttaaatatgtaaaagaaagagtacaatttggtagaccattatcaaaattccaaaatacacaattccaattagctgatatggaagttaaggtacaagcggctagacaccttgtatatcaagcagctataaataaagacttaggaaaaccttatggagtagaagcagcaatggcaaaattatttgcagctgaaacagctatggaagttactacaaaagctgtacaacttcatggaggatatggatacactcgtgactatccagtagaaagaatgatgagagatgctaagataactgaaatatatgaaggaactagtgaagttcaaagaatggttatttcaggaaaactattaaaatagtaagaaggagatatacatatggaggaaggatttatgaatatagtcgtttgtataaaacaagttccagatacaacagaagttaaactagatcctaatacaggtactttaattagagatggagtaccaagtataataaaccctgatgataaagcaggtttagaagaagctataaaattaaaagaagaaatgggtgctcatgtaactgttataacaatgggacctcctcaagcagatatggctttaaaagaagctttagcaatgggtgcagatagaggtatattattaacagatagagcatttgcgggtgctgatacttgggcaacttcatcagcattagcaggagcattaaaaaatatagattttgatattataatagctggaagacaggcgatagatggagatactgcacaagttggacctcaaatagctgaacatttaaatcttccatcaataacatatgctgaagaaataaaaactgaaggtgaatatgtattagtaaaaagacaatttgaagattgttgccatgacttaaaagttaaaatgccatgccttataacaactcttaaagatatgaacacaccaagatacatgaaagttggaagaatatatgatgctttcgaaaatgatgtagtagaaacatggactgtaaaagatatagaagttgacccttctaatttaggtcttaaaggttctccaactagtgtatttaaatcatttacaaaatcagttaaaccagctggtacaatatacaatgaagatgcgaaaacatcagctggaattatcatagataaattaaaagagaagtatatcatataataagaaggagatatacatatgggtaacgttttagtagtaatagaacaaagagaaaatgtaattcaaactgtttctttagaattactaggaaaggctacagaaatagcaaaagattatgatacaaaagtttctgcattacttttaggtagtaaggtagaaggtttaatagatacattagcacactatggtgcagatgaggtaatagtagtagatgatgaagctttagcagtgtatacaactgaaccatatacaaaagcagcttatgaagcaataaaagcagctgaccctatagttgtattatttggtgcaacttcaataggtagagatttagcgcctagagtttctgctagaatacatacaggtcttactgctgactgtacaggtcttgcagtagctgaagatacaaaattattattaatgacaagacctgcctttggtggaaatataatggcaacaatagtttgtaaagatttcagacctcaaatgtctacagttagaccaggggttatgaagaaaaatgaacctgatgaaactaaagaagctgtaattaaccgtttcaaggtagaatttaatgatgctgataaattagttcaagttgtacaagtaataaaagaagctaaaaaacaagttaaaatagaagatgctaagatattagtttctgctggacgtggaatgggtggaaaagaaaacttagacatactttatgaattagctgaaattataggtggagaagtttctggttctcgtgccactatagatgcaggttggttagataaagcaagacaagttggtcaaactggtaaaactgtaagaccagacctttatatagcatgtggtatatctggagcaatacaacatatagctggtatggaagatgctgagtttatagttgctataaataaaaatccagaagctccaatatttaaatatgctgatgttggtatagttggagatgttcataaagtgcttccagaacttatcagtcagttaagtgttgcaaaagaaaaaggtgaagttttagctaactaataagaaggagatatacatatgagagaagtagtaattgccagtgcagctagaacagcagtaggaagttttggaggagcatttaaatcagtttcagcggtagagttaggggtaacagcagctaaagaagctataaaaagagctaacataactccagatatgatagatgaatctcttttagggggagtacttacagcaggtcttggacaaaatatagcaagacaaatagcattaggagcaggaataccagtagaaaaaccagctatgactataaatatagtttgtggttctggattaagatctgtttcaatggcatctcaacttatagcattaggtgatgctgatataatgttagttggtggagctgaaaacatgagtatgtctccttatttagtaccaagtgcgagatatggtgcaagaatgggtgatgctgcttttgttgattcaatgataaaagatggattatcagacatatttaataactatcacatgggtattactgctgaaaacatagcagagcaatggaatataactagagaagaacaagatgaattagctcttgcaagtcaaaataaagctgaaaaagctcaagctgaaggaaaatttgatgaagaaatagttcctgttgttataaaaggaagaaaaggtgacactgtagtagataaagatgaatatattaagcctggcactacaatggagaaacttgctaagttaagacctgcatttaaaaaagatggaacagttactgctggtaatgcatcaggaataaatgatggtgctgctatgttagtagtaatggctaaagaaaaagctgaagaactaggaatagagcctcttgcaactatagtttcttatggaacagctggtgttgaccctaaaataatgggatatggaccagttccagcaactaaaaaagctttagaagctgctaatatgactattgaagatatagatttagttgaagctaatgaggcatttgctgcccaatctgtagctgtaataagagacttaaatatagatatgaataaagttaatgttaatggtggagcaatagctataggacatccaataggatgctcaggagcaagaatacttactacacttttatatgaaatgaagagaagagatgctaaaactggtcttgctacactttgtataggcggtggaatgggaactactttaatagttaagagatagtaagaaggagatatacatatgaaattagctgtaataggtagtggaactatgggaagtggtattgtacaaacttttgcaagttgtggacatgatgtatgtttaaagagtagaactcaaggtgctatagataaatgtttagctttattagataaaaatttaactaagttagttactaagggaaaaatggatgaagctacaaaagcagaaatattaagtcatgttagttcaactactaattatgaagatttaaaagatatggatttaataatagaagcatctgtagaagacatgaatataaagaaagatgttttcaagttactagatgaattatgtaaagaagatactatcttggcaacaaatacttcatcattatctataacagaaatagcttcttctactaagcgcccagataaagttataggaatgcatttctttaatccagttcctatgatgaaattagttgaagttataagtggtcagttaacatcaaaagttacttttgatacagtatttgaattatctaagagtatcaataaagtaccagtagatgtatctgaatctcctggatttgtagtaaatagaatacttatacctatgataaatgaagctgttggtatatatgcagatggtgttgcaagtaaagaagaaatagatgaagctatgaaattaggagcaaaccatccaatgggaccactagcattaggtgatttaatcggattagatgttgttttagctataatgaacgttttatatactgaatttggagatactaaatatagacctcatccacttttagctaaaatggttagagctaatcaattaggaagaaaaactaagataggattctatgattataataaataataagaaggagatatacatatgagtacaagtgatgttaaagtttatgagaatgtagctgttgaagtagatggaaatatatgtacagtgaaaatgaatagacctaaagcccttaatgcaataaattcaaagactttagaagaactttatgaagtatttgtagatattaataatgatgaaactattgatgttgtaatattgacaggggaaggaaaggcatttgtagctggagcagatattgcatacatgaaagatttagatgctgtagctgctaaagattttagtatcttaggagcaaaagcttttggagaaatagaaaatagtaaaaaagtagtgatagctgctgtaaacggatttgctttaggtggaggatgtgaacttgcaatggcatgtgatataagaattgcatctgctaaagctaaatttggtcagccagaagtaactcttggaataactccaggatatggaggaactcaaaggcttacaagattggttggaatggcaaaagcaaaagaattaatctttacaggtcaagttataaaagctgatgaagctgaaaaaatagggctagtaaatagagtcgttgagccagacattttaatagaagaagttgagaaattagctaagataatagctaaaaatgctcagcttgcagttagatactctaaagaagcaatacaacttggtgctcaaactgatataaatactggaatagatatagaatctaatttatttggtctttgtttttcaactaaagaccaaaaagaaggaatgtcagctttcgttgaaaagagagaagctaactttataaaagggtaataagaaggagatatacatatgagaagttttgaagaagtaattaagtttgcaaaagaaagaggacctaaaactatatcagtagcatgttgccaagataaagaagttttaatggcagttgaaatggctagaaaagaaaaaatagcaaatgccattttagtaggagatatagaaaagactaaagaaattgcaaaaagcatagacatggatatcgaaaattatgaactgatagatataaaagatttagcagaagcatctctaaaatctgttgaattagtttcacaaggaaaagccgacatggtaatgaaaggcttagtagacacatcaataatactaaaagcagttttaaataaagaagtaggtcttagaactggaaatgtattaagtcacgtagcagtatttgatgtagagggatatgatagattatttttcgtaactgacgcagctatgaacttagctcctgatacaaatactaaaaagcaaatcatagaaaatgcttgcacagtagcacattcattagatataagtgaaccaaaagttgctgcaatatgcgcaaaagaaaaagtaaatccaaaaatgaaagatacagttgaagctaaagaactagaagaaatgtatgaaagaggagaaatcaaaggttgtatggttggtgggccttttgcaattgataatgcagtatctttagaagcagctaaacataaaggtataaatcatcctgtagcaggacgagctgatatattattagccccagatattgaaggtggtaacatattatataaagctttggtattcttctcaaaatcaaaaaatgcaggagttatagttggggctaaagcaccaataatattaacttctagagcagacagtgaagaaactaaactaaactcaatagctttaggtgttttaatggcagcaaaggcataataagaaggagatatacatatgagcaaaatatttaaaatcttaacaataaatcctggttcgacatcaactaaaatagctgtatttgataatgaggatttagtatttgaaaaaactttaagacattcttcagaagaaataggaaaatatgagaaggtgtctgaccaatttgaatttcgtaaacaagtaatagaagaagctctaaaagaaggtggagtaaaaacatctgaattagatgctgtagtaggtagaggaggacttcttaaacctataaaaggtggtacttattcagtaagtgctgctatgattgaagatttaaaagtgggagttttaggagaacacgcttcaaacctaggtggaataatagcaaaacaaataggtgaagaagtaaatgttccttcatacatagtagaccctgttgttgtagatgaattagaagatgttgctagaatttctggtatgcctgaaataagtagagcaagtgtagtacatgctttaaatcaaaaggcaatagcaagaagatatgctagagaaataaacaagaaatatgaagatataaatcttatagttgcacacatgggtggaggagtttctgttggagctcataaaaatggtaaaatagtagatgttgcaaacgcattagatggagaaggacctttctctccagaaagaagtggtggactaccagtaggtgcattagtaaaaatgtgctttagtggaaaatatactcaagatgaaattaaaaagaaaataaaaggtaatggcggactagttgcatacttaaacactaatgatgctagagaagttgaagaaagaattgaagctggtgatgaaaaagctaaattagtatatgaagctatggcatatcaaatctctaaagaaataggagctagtgctgcagttcttaagggagatgtaaaagcaatattattaactggtggaatcgcatattcaaaaatgtttacagaaatgattgcagatagagttaaatttatagcagatgtaaaagtttatccaggtgaagatgaaatgattgcattagctcaaggtggacttagagttttaactggtgaagaagaggctcaagtttatgataactaataa

SEQ ID NO: 403 - DNA, 6787 bp, Artificial Sequence
  Description of Artificial Sequence: Synthetic polynucleotide
ttattatcgcaccgcaatcgggattttcgattcataaagcaggtcgtaggtcggcttgttgagcaggtcttgcagcgtgaaaccgtccagatacgtgaaaaacgacttcattgcaccgccgagtatgcccgtcagccggcaggacggcgtaatcaggcattcgttgttcgggcccatacactcgaccagctgcatcggttcgaggtggcggacgaccgcgccgatattgatgcgttcgggcggcgcggccagcctcagcccgccgcctttcccgcgtacgctgtgcaagaacccgcctttgaccagcgcggtaaccactttcatcaaatggcttttggaaatgccgtaggtcgaggcgatggtggcgatattgaccagcgcgtcgtcgttgacggcggtgtagatgaggacgcgcagcccgtagtcggtatgttgggtcagatacatacaacctccttagtacatgcaaaattatttctagagcaacatacgagccggaagcataaagtgtaaagcctggggtgcctaatgagttgagttgaggaattataacaggaagaaatattcctcatacgcttgtaattcctctatggttgttgacaattaatcatcggctcgtataatgtataacattcatattttgtgaattttaaactctagaaataattttgtttaactttaagaaggagatatacatatgatcgtaaaacctatggtacgcaacaatatctgcctgaacgcccatcctcagggctgcaagaagggagtggaagatcagattgaatataccaagaaacgcattaccgcagaagtcaaagctggcgcaaaagctccaaaaaacgttctggtgcttggctgctcaaatggttacggcctggcgagccgcattactgctgcgttcggatacggggctgcgaccatcggcgtgtcctttgaaaaagcgggttcagaaaccaaatatggtacaccgggatggtacaataatttggcatttgatgaagcggcaaaacgcgagggtctttatagcgtgacgatcgacggcgatgcgttttcagacgagatcaaggcccaggtaattgaggaagccaaaaaaaaaggtatcaaatttgatctgatcgtatacagcttggccagcccagtacgtactgatcctgatacaggtatcatgcacaaaagcgttttgaaaccctttggaaaaacgttcacaggcaaaacagtagatccgtttactggcgagctgaaggaaatctccgcggaaccagcaaatgacgaggaagcagccgccactgttaaagttatggggggtgaagattgggaacgttggattaagcagctgtcgaaggaaggcctcttagaagaaggctgtattaccttggcctatagttatattggccctgaagctacccaagctttgtaccgtaaaggcacaatcggcaaggccaaagaacacctggaggccacagcacaccgtctcaacaaagagaacccgtcaatccgtgccttcgtgagcgtgaataaaggcctggtaacccgcgcaagcgccgtaatcccggtaatccctctgtatctcgccagcttgttcaaagtaatgaaagagaagggcaatcatgaaggttgtattgaacagatcacgcgtctgtacgccgagcgcctgtaccgtaaagatggtacaattccagttgatgaggaaaatcgcattcgcattgatgattgggagttagaagaagacgtccagaaagcggtatccgcgttgatggagaaagtcacgggtgaaaacgcagaatctctcactgacttagcggggtaccgccatgatttcttagctagtaacggctttgatgtagaaggtattaattatgaagcggaagttgaacgcttcgaccgtatctgataagaaggagatatacatatgagagaagtagtaattgccagtgcagctagaacagcagtaggaagttttggaggagcatttaaatcagtttcagcggtagagttaggggtaacagcagctaaagaagctataaaaagagctaacataactccagatatgatagatgaatctcttttagggggagtacttacagcaggtcttggacaaaatatagcaagacaaatagcattaggagcaggaataccagtagaaaaaccagctatgactataaatatagtttgtggttctggattaagatctgtttcaatggcatctcaacttatagcattaggtgatgctgatataatgttagttggtggagctgaaaacatgagtatgtctccttatttagtaccaagtgcgagatatggtgcaagaatgggtgatgctgcttttgttgattcaatgataaaagatggattatcagacatatttaataactatcacatgggtattactgctgaaaacatagcagagcaatggaatataactagagaagaacaagatgaattagctcttgcaagtcaaaataaagctgaaaaagctcaagctgaaggaaaatttgatgaagaaatagttcctgttgttataaaaggaagaaaaggtgacactgtagtagataaagatgaatatattaagcctggcactacaatggagaaacttgctaagttaagacctgcatttaaaaaagatggaacagttactgctggtaatgcatcaggaataaatgatggtgctgctatgttagtagtaatggctaaagaaaaagctgaagaactaggaatagagcctcttgcaactatagtttcttatggaacagctggtgttgaccctaaaataatgggatatggaccagttccagcaactaaaaaagctttagaagctgctaatatgactattgaagatatagatttagttgaagctaatgaggcatttgctgcccaatctgtagctgtaataagagacttaaatatagatatgaataaagttaatgttaatggtggagcaatagctataggacatccaataggatgctcaggagcaagaatacttactacacttttatatgaaatgaagagaagagatgctaaaactggtcttgctacactttgtataggcggtggaatgggaactactttaatagttaagagatagtaagaaggagatatacatatgaaattagctgtaataggtagtggaactatgggaagtggtattgtacaaacttttgcaagttgtggacatgatgtatgtttaaagagtagaactcaaggtgctatagataaatgtttagctttattagataaaaatttaactaagttagttactaagggaaaaatggatgaagctacaaaagcagaaatattaagtcatgttagttcaactactaattatgaagatttaaaagatatggatttaataatagaagcatctgtagaagacatgaatataaagaaagatgttttcaagttactagatgaattatgtaaagaagatactatcttggcaacaaatacttcatcattatctataacagaaatagcttcttctactaagcgcccagataaagttataggaatgcatttctttaatccagttcctatgatgaaattagttgaagttataagtggtcagttaacatcaaaagttacttttgatacagtatttgaattatctaagagtatcaataaagtaccagtagatgtatctgaatctcctggatttgtagtaaatagaatacttatacctatgataaatgaagctgttggtatatatgcagatggtgttgcaagtaaagaagaaatagatgaagctatgaaattaggagcaaaccatccaatgggaccactagcattaggtgatttaatcggattagatgttgttttagctataatgaacgttttatatactgaatttggagatactaaatatagacctcatccacttttagctaaaatggttagagctaatcaattaggaagaaaaactaagataggattctatgattataataaataataagaaggagatatacatatgagtacaagtgatgttaaagtttatgagaatgtagctgttgaagtagatggaaatatatgtacagtgaaaatgaatagacctaaagcccttaatgcaataaattcaaagactttagaagaactttatgaagtatttgtagatattaataatgatgaaactattgatgttgtaatattgacaggggaaggaaaggcatttgtagctggagcagatattgcatacatgaaagatttagatgctgtagctgctaaagattttagtatcttaggagcaaaagcttttggagaaatagaaaatagtaaaaaagtagtgatagctgctgtaaacggatttgctttaggtggaggatgtgaacttgcaatggcatgtgatataagaattgcatctgctaaagctaaatttggtcagccagaagtaactcttggaataactccaggatatggaggaactcaaaggcttacaagattggttggaatggcaaaagcaaaagaattaatctttacaggtcaagttataaaagctgatgaagctgaaaaaatagggctagtaaatagagtcgttgagccagacattttaatagaagaagttgagaaattagctaagataatagctaaaaatgctcagcttgcagttagatactctaaagaagcaatacaacttggtgctcaaactgatataaatactggaatagatatagaatctaatttatttggtctttgtttttcaactaaagaccaaaaagaaggaatgtcagctttcgttgaaaagagagaagctaactttataaaagggtaataagaaggagatatacatatgagaagttttgaagaagtaattaagtttgcaaaagaaagaggacctaaaactatatcagtagcatgttgccaagataaagaagttttaatggcagttgaaatggctagaaaagaaaaaatagcaaatgccattttagtaggagatatagaaaagactaaagaaattgcaaaaagcatagacatggatatcgaaaattatgaactgatagatataaaagatttagcagaagcatctctaaaatctgttgaattagtttcacaaggaaaagccgacatggtaatgaaaggcttagtagacacatcaataatactaaaagcagttttaaataaagaagtaggtcttagaactggaaatgtattaagtcacgtagcagtatttgatgtagagggatatgatagattatttttcgtaactgacgcagctatgaacttagctcctgatacaaatactaaaaagcaaatcatagaaaatgcttgcacagtagcacattcattagatataagtgaaccaaaagttgctgcaatatgcgcaaaagaaaaagtaaatccaaaaatgaaagatacagttgaagctaaagaactagaagaaatgtatgaaagaggagaaatcaaaggttgtatggttggtgggccttttgcaattgataatgcagtatctttagaagcagctaaacataaaggtataaatcatcctgtagcaggacgagctgatatattattagccccagatattgaaggtggtaacatattatataaagctttggtattcttctcaaaatcaaaaaatgcaggagttatagttggggctaaagcaccaataatattaacttctagagcagacagtgaagaaactaaactaaactcaatagctttaggtgttttaatggcagcaaaggcataataagaaggagatatacatatgagcaaaatatttaaaatcttaacaataaatcctggttcgacatcaactaaaatagctgtatttgataatgaggatttagtatttgaaaaaactttaagacattcttcagaagaaataggaaaatatgagaaggtgtctgaccaatttgaatttcgtaaacaagtaatagaagaagctctaaaagaaggtggagtaaaaacatctgaattagatgctgtagtaggtagaggaggacttcttaaacctataaaaggtggtacttattcagtaagtgctgctatgattgaagatttaaaagtgggagttttaggagaacacgcttcaaacctaggtggaataatagcaaaacaaataggtgaagaagtaaatgttccttcatacatagtagaccctgttgttgtagatgaattagaagatgttgctagaatttctggtatgcctgaaataagtagagcaagtgtagtacatgctttaaatcaaaaggcaatagcaagaagatatgctagagaaataaacaagaaatatgaagatataaatcttatagttgcacacatgggtggaggagtttctgttggagctcataaaaatggtaaaatagtagatgttgcaaacgcattagatggagaaggacctttctctccagaaagaagtggtggactaccagtaggtgcattagtaaaaatgtgctttagtggaaaatatactcaagatgaaattaaaaagaaaataaaaggtaatggcggactagttgcatacttaaacactaatgatgctagagaagttgaagaaagaattgaagctggtgatgaaaaagctaaattagtatatgaagctatggcatatcaaatctctaaagaaataggagctagtgctgcagttcttaagggagatgtaaaagcaatattattaactggtggaatcgcatattcaaaaatgtttacagaaatgattgcagatagagttaaatttatagcagatgtaaaagtttatccaggtgaagatgaaatgattgcattagctcaaggtggacttagagttttaactggtgaagaagaggctcaagtttatgataactaataa

SEQ ID NO: 404 - DNA, 5644 bp, Artificial Sequence
  Description of Artificial Sequence: Synthetic polynucleotide
ttattatcgcaccgcaatcgggattttcgattcataaagcaggtcgtaggtcggcttgttgagcaggtcttgcagcgtgaaaccgtccagatacgtgaaaaacgacttcattgcaccgccgagtatgcccgtcagccggcaggacggcgtaatcaggcattcgttgttcgggcccatacactcgaccagctgcatcggttcgaggtggcggacgaccgcgccgatattgatgcgttcgggcggcgcggccagcctcagcccgccgcctttcccgcgtacgctgtgcaagaacccgcctttgaccagcgcggtaaccactttcatcaaatggcttttggaaatgccgtaggtcgaggcgatggtggcgatattgaccagcgcgtcgtcgttgacggcggtgtagatgaggacgcgcagcccgtagtcggtatgttgggtcagatacatacaacctccttagtacatgcaaaattatttctagagcaacatacgagccggaagcataaagtgtaaagcctggggtgcctaatgagttgagttgaggaattataacaggaagaaatattcctcatacgcttgtaattcctctatggttgttgacaattaatcatcggctcgtataatgtataacattcatattttgtgaattttaaactctagaaataattttgtttaactttaagaaggagatatacatatgatcgtaaaacctatggtacgcaacaatatctgcctgaacgcccatcctcagggctgcaagaagggagtggaagatcagattgaatataccaagaaacgcattaccgcagaagtcaaagctggcgcaaaagctccaaaaaacgttctggtgcttggctgctcaaatggttacggcctggcgagccgcattactgctgcgttcggatacggggctgcgaccatcggcgtgtcctttgaaaaagcgggttcagaaaccaaatatggtacaccgggatggtacaataatttggcatttgatgaagcggcaaaacgcgagggtctttatagcgtgacgatcgacggcgatgcgttttcagacgagatcaaggcccaggtaattgaggaagccaaaaaaaaaggtatcaaatttgatctgatcgtatacagcttggccagcccagtacgtactgatcctgatacaggtatcatgcacaaaagcgttttgaaaccctttggaaaaacgttcacaggcaaaacagtagatccgtttactggcgagctgaaggaaatctccgcggaaccagcaaatgacgaggaagcagccgccactgttaaagttatggggggtgaagattgggaacgttggattaagcagctgtcgaaggaaggcctcttagaagaaggctgtattaccttggcctatagttatattggccctgaagctacccaagctttgtaccgtaaaggcacaatcggcaaggccaaagaacacctggaggccacagcacaccgtctcaacaaagagaacccgtcaatccgtgccttcgtgagcgtgaataaaggcctggtaacccgcgcaagcgccgtaatcccggtaatccctctgtatctcgccagcttgttcaaagtaatgaaagagaagggcaatcatgaaggttgtattgaacagatcacgcgtctgtacgccgagcgcctgtaccgtaaagatggtacaattccagttgatgaggaaaatcgcattcgcattgatgattgggagttagaagaagacgtccagaaagcggtatccgcgttgatggagaaagtcacgggtgaaaacgcagaatctctcactgacttagcggggtaccgccatgatttcttagctagtaacggctttgatgtagaaggtattaattatgaagcggaagttgaacgcttcgaccgtatctgataagaaggagatatacatatgagagaagtagtaattgccagtgcagctagaacagcagtaggaagttttggaggagcatttaaatcagtttcagcggtagagttaggggtaacagcagctaaagaagctataaaaagagctaacataactccagatatgatagatgaatctcttttagggggagtacttacagcaggtcttggacaaaatatagcaagacaaatagcattaggagcaggaataccagtagaaaaaccagctatgactataaatatagtttgtggttctggattaagatctgtttcaatggcatctcaacttatagcattaggtgatgctgatataatgttagttggtggagctgaaaacatgagtatgtctccttatttagtaccaagtgcgagatatggtgcaagaatgggtgatgctgcttttgttgattcaatgataaaagatggattatcagacatatttaataactatcacatgggtattactgctgaaaacatagcagagcaatggaatataactagagaagaacaagatgaattagctcttgcaagtcaaaataaagctgaaaaagctcaagctgaaggaaaatttgatgaagaaatagttcctgttgttataaaaggaagaaaaggtgacactgtagtagataaagatgaatatattaagcctggcactacaatggagaaacttgctaagttaagacctgcatttaaaaaagatggaacagttactgctggtaatgcatcaggaataaatgatggtgctgctatgttagtagtaatggctaaagaaaaagctgaagaactaggaatagagcctcttgcaactatagtttcttatggaacagctggtgttgaccctaaaataatgggatatggaccagttccagcaactaaaaaagctttagaagctgctaatatgactattgaagatatagatttagttgaagctaatgaggcatttgctgcccaatctgtagctgtaataagagacttaaatatagatatgaataaagttaatgttaatggtggagcaatagctataggacatccaataggatgctcaggagcaagaatacttactacacttttatatgaaatgaagagaagagatgctaaaactggtcttgctacactttgtataggcggtggaatgggaactactttaatagttaagagatagtaagaaggagatatacatatgaaattagctgtaataggtagtggaactatgggaagtggtattgtacaaacttttgcaagttgtggacatgatgtatgtttaaagagtagaactcaaggtgctatagataaatgtttagctttattagataaaaatttaactaagttagttactaagggaaaaatggatgaagctacaaaagcagaaatattaagtcatgttagttcaactactaattatgaagatttaaaagatatggatttaataatagaagcatctgtagaagacatgaatataaagaaagatgttttcaagttactagatgaattatgtaaagaagatactatcttggcaacaaatacttcatcattatctataacagaaatagcttcttctactaagcgcccagataaagttataggaatgcatttctttaatccagttcctatgatgaaattagttgaagttataagtggtcagttaacatcaaaagttacttttgatacagtatttgaattatctaagagtatcaataaagtaccagtagatgtatctgaatctcctggatttgtagtaaatagaatacttatacctatgataaatgaagctgttggtatatatgcagatggtgttgcaagtaaagaagaaatagatgaagctatgaaattaggagcaaaccatccaatgggaccactagcattaggtgatttaatcggattagatgttgttttagctataatgaacgttttatatactgaatttggagatactaaatatagacctcatccacttttagctaaaatggttagagctaatcaattaggaagaaaaactaagataggattctatgattataataaataataagaaggagatatacatatgagtacaagtgatgttaaagtttatgagaatgtagctgttgaagtagatggaaatatatgtacagtgaaaatgaatagacctaaagcccttaatgcaataaattcaaagactttagaagaactttatgaagtatttgtagatattaataatgatgaaactattgatgttgtaatattgacaggggaaggaaaggcatttgtagctggagcagatattgcatacatgaaagatttagatgctgtagctgctaaagattttagtatcttaggagcaaaagcttttggagaaatagaaaatagtaaaaaagtagtgatagctgctgtaaacggatttgctttaggtggaggatgtgaacttgcaatggcatgtgatataagaattgcatctgctaaagctaaatttggtcagccagaagtaactcttggaataactccaggatatggaggaactcaaaggcttacaagattggttggaatggcaaaagcaaaagaattaatctttacaggtcaagttataaaagctgatgaagctgaaaaaatagggctagtaaatagagtcgttgagccagacattttaatagaagaagttgagaaattagctaagataatagctaaaaatgctcagcttgcagttagatactctaaagaagcaatacaacttggtgctcaaactgatataaatactggaatagatatagaatctaatttatttggtctttgtttttcaactaaagaccaaaaagaaggaatgtcagctttcgttgaaaagagagaagctaactttataaaagggtaataagaaggagatatacatatgagtcaggcgctaaaaaatttactgacattgttaaatctggaaaaaattgaggaaggactctttcgcggccagagtgaagatttaggtttacgccaggtgtttggcggccaggtcgtgggtcaggccttgtatgctgcaaaagagaccgtccctgaagagcggctggtacattcgtttcacagctactttcttcgccctggcgatagtaagaagccgattatttatgatgtcgaaacgctgcgtgacggtaacagcttcagcgcccgccgggttgctgctattcaaaacggcaaaccgattttttatatgactgcctctttccaggcaccagaagcgggtttcgaacatcaaaaaacaatgccgtccgcgccagcgcctgatggcctcccttcggaaacgcaaatcgcccaatcgctggcgcacctgctgccgccagtgctgaaagataaattcatctgcgatcgtccgctggaagtccgtccggtggagtttcataacccactgaaaggtcacgtcgcagaaccacatcgtcaggtgtggatccgcgcaaatggtagcgtgccggatgacctgcgcgttcatcagtatctgctcggttacgcttctgatcttaacttcctgccggtagctctacagccgcacggcatcggttttctcgaaccggggattcagattgccaccattgaccattccatgtggttccatcgcccgtttaatttgaatgaatggctgctgtatagcgtggagagcacctcggcgtccagcgcacgtggctttgtgcgcggtgagttttatacccaagacggcgtactggttgcctcgaccgttcaggaaggggtgatgcgtaatcacaattaa

SEQ ID NO: 405 - DNA, 8012 bp, Artificial Sequence
  Description of Artificial Sequence: Synthetic polynucleotide
ctcgagttcattatccatcctccatcgccacgatagttcatggcgataggtagaatagcaatgaacgattatccctatcaagcattctgactgataattgctcacacgaattcattaaagaggagaaaggtaccatggatttaaattctaaaaaatatcagatgcttaaagagctatatgtaagcttcgctgaaaatgaagttaaacctttagcaacagaacttgatgaagaagaaagatttccttatgaaacagtggaaaaaatggcaaaagcaggaatgatgggtataccatatccaaaagaatatggtggagaaggtggagacactgtaggatatataatggcagttgaagaattgtctagagtttgtggtactacaggagttatattatcagctcatacatctcttggctcatggcctatatatcaatatggtaatgaagaacaaaaacaaaaattcttaagaccactagcaagtggagaaaaattaggagcatttggtcttactgagcctaatgctggtacagatgcgtctggccaacaaacaactgctgttttagacggggatgaatacatacttaatggctcaaaaatatttataacaaacgcaatagctggtgacatatatgtagtaatggcaatgactgataaatctaaggggaacaaaggaatatcagcatttatagttgaaaaaggaactcctgggtttagctttggagttaaagaaaagaaaatgggtataagaggttcagctacgagtgaattaatatttgaggattgcagaatacctaaagaaaatttacttggaaaagaaggtcaaggatttaagatagcaatgtctactcttgatggtggtagaattggtatagctgcacaagctttaggtttagcacaaggtgctcttgatgaaactgttaaatatgtaaaagaaagagtacaatttggtagaccattatcaaaattccaaaatacacaattccaattagctgatatggaagttaaggtacaagcggctagacaccttgtatatcaagcagctataaataaagacttaggaaaaccttatggagtagaagcagcaatggcaaaattatttgcagctgaaacagctatggaagttactacaaaagctgtacaacttcatggaggatatggatacactcgtgactatccagtagaaagaatgatgagagatgctaagataactgaaatatatgaaggaactagtgaagttcaaagaatggttatttcaggaaaactattaaaatagtaagaaggagatatacatatggaggaaggatttatgaatatagtcgtttgtataaaacaagttccagatacaacagaagttaaactagatcctaatacaggtactttaattagagatggagtaccaagtataataaaccctgatgataaagcaggtttagaagaagctataaaattaaaagaagaaatgggtgctcatgtaactgttataacaatgggacctcctcaagcagatatggctttaaaagaagctttagcaatgggtgcagatagaggtatattattaacagatagagcatttgcgggtgctgatacttgggcaacttcatcagcattagcaggagcattaaaaaatatagattttgatattataatagctggaagacaggcgatagatggagatactgcacaagttggacctcaaatagctgaacatttaaatcttccatcaataacatatgctgaagaaataaaaactgaaggtgaatatgtattagtaaaaagacaatttgaagattgttgccatgacttaaaagttaaaatgccatgccttataacaactcttaaagatatgaacacaccaagatacatgaaagttggaagaatatatgatgctttcgaaaatgatgtagtagaaacatggactgtaaaagatatagaagttgacccttctaatttaggtcttaaaggttctccaactagtgtatttaaatcatttacaaaatcagttaaaccagctggtacaatatacaatgaagatgcgaaaacatcagctggaattatcatagataaattaaaagagaagtatatcatataataagaaggagatatacatatgggtaacgttttagtagtaatagaacaaagagaaaatgtaattcaaactgtttctttagaattactaggaaaggctacagaaatagcaaaagattatgatacaaaagtttctgcattacttttaggtagtaaggtagaaggtttaatagatacattagcacactatggtgcagatgaggtaatagtagtagatgatgaagctttagcagtgtatacaactgaaccatatacaaaagcagcttatgaagcaataaaagcagctgaccctatagttgtattatttggtgcaacttcaataggtagagatttagcgcctagagtttctgctagaatacatacaggtcttactgctgactgtacaggtcttgcagtagctgaagatacaaaattattattaatgacaagacctgcctttggtggaaatataatggcaacaatagtttgtaaagatttcagacctcaaatgtctacagttagaccaggggttatgaagaaaaatgaacctgatgaaactaaagaagctgtaattaaccgtttcaaggtagaatttaatgatgctgataaattagttcaagttgtacaagtaataaaagaagctaaaaaacaagttaaaatagaagatgctaagatattagtttctgctggacgtggaatgggtggaaaagaaaacttagacatactttatgaattagctgaaattataggtggagaagtttctggttctcgtgccactatagatgcaggttggttagataaagcaagacaagttggtcaaactggtaaaactgtaagaccagacctttatatagcatgtggtatatctggagcaatacaacatatagctggtatggaagatgctgagtttatagttgctataaataaaaatccagaagctccaatatttaaatatgctgatgttggtatagttggagatgttcataaagtgcttccagaacttatcagtcagttaagtgttgcaaaagaaaaaggtgaagttttagctaactaataagaaggagatatacatatgagagaagtagtaattgccagtgcagctagaacagcagtaggaagttttggaggagcatttaaatcagtttcagcggtagagttaggggtaacagcagctaaagaagctataaaaagagctaacataactccagatatgatagatgaatctcttttagggggagtacttacagcaggtcttggacaaaatatagcaagacaaatagcattaggagcaggaataccagtagaaaaaccagctatgactataaatatagtttgtggttctggattaagatctgtttcaatggcatctcaacttatagcattaggtgatgctgatataatgttagttggtggagctgaaaacatgagtatgtctccttatttagtaccaagtgcgagatatggtgcaagaatgggtgatgctgcttttgttgattcaatgataaaagatggattatcagacatatttaataactatcacatgggtattactgctgaaaacatagcagagcaatggaatataactagagaagaacaagatgaattagctcttgcaagtcaaaataaagctgaaaaagctcaagctgaaggaaaatttgatgaagaaatagttcctgttgttataaaaggaagaaaaggtgacactgtagtagataaagatgaatatattaagcctggcactacaatggagaaacttgctaagttaagacctgcatttaaaaaagatggaacagttactgctggtaatgcatcaggaataaatgatggtgctgctatgttagtagtaatggctaaagaaaaagctgaagaactaggaatagagcctcttgcaactatagtttcttatggaacagctggtgttgaccctaaaataatgggatatggaccagttccagcaactaaaaaagctttagaagctgctaatatgactattgaagatatagatttagttgaagctaatgaggcatttgctgcccaatctgtagctgtaataagagacttaaatatagatatgaataaagttaatgttaatggtggagcaatagctataggacatccaataggatgctcaggagcaagaatacttactacacttttatatgaaatgaagagaagagatgctaaaactggtcttgctacactttgtataggcggtggaatgggaactactttaatagttaagagatagtaagaaggagatatacatatgaaattagctgtaataggtagtggaactatgggaagtggtattgtacaaacttttgcaagttgtggacatgatgtatgtttaaagagtagaactcaaggtgctatagataaatgtttagctttattagataaaaatttaactaagttagttactaagggaaaaatggatgaagctacaaaagcagaaatattaagtcatgttagttcaactactaattatgaagatttaaaagatatggatttaataatagaagcatctgtagaagacatgaatataaagaaagatgttttcaagttactagatgaattatgtaaagaagatactatcttggcaacaaatacttcatcattatctataacagaaatagcttcttctactaagcgcccagataaagttataggaatgcatttctttaatccagttcctatgatgaaattagttgaagttataagtggtcagttaacatcaaaagttacttttgatacagtatttgaattatctaagagtatcaataaagtaccagtagatgtatctgaatctcctggatttgtagtaaatagaatacttatacctatgataaatgaagctgttggtatatatgcagatggtgttgcaagtaaagaagaaatagatgaagctatgaaattaggagcaaaccatccaatgggaccactagcattaggtgatttaatcggattagatgttgttttagctataatgaacgttttatatactgaatttggagatactaaatatagacctcatccacttttagctaaaatggttagagctaatcaattaggaagaaaaactaagataggattctatgattataataaataataagaaggagatatacatatgagtacaagtgatgttaaagtttatgagaatgtagctgttgaagtagatggaaatatatgtacagtgaaaatgaatagacctaaagcccttaatgcaataaattcaaagactttagaagaactttatgaagtatttgtagatattaataatgatgaaactattgatgttgtaatattgacaggggaaggaaaggcatttgtagctggagcagatattgcatacatgaaagatttagatgctgtagctgctaaagattttagtatcttaggagcaaaagcttttggagaaatagaaaatagtaaaaaagtagtgatagctgctgtaaacggatttgctttaggtggaggatgtgaacttgcaatggcatgtgatataagaattgcatctgctaaagctaaatttggtcagccagaagtaactcttggaataactccaggatatggaggaactcaaaggcttacaagattggttggaatggcaaaagcaaaagaattaatctttacaggtcaagttataaaagctgatgaagctgaaaaaatagggctagtaaatagagtcgttgagccagacattttaatagaagaagttgagaaattagctaagataatagctaaaaatgctcagcttgcagttagatactctaaagaagcaatacaacttggtgctcaaactgatataaatactggaatagatatagaatctaatttatttggtctttgtttttcaactaaagaccaaaaagaaggaatgtcagctttcgttgaaaagagagaagctaactttataaaagggtaataagaaggagatatacatatgagaagttttgaagaagtaattaagtttgcaaaagaaagaggacctaaaactatatcagtagcatgttgccaagataaagaagttttaatggcagttgaaatggctagaaaagaaaaaatagcaaatgccattttagtaggagatatagaaaagactaaagaaattgcaaaaagcatagacatggatatcgaaaattatgaactgatagatataaaagatttagcagaagcatctctaaaatctgttgaattagtttcacaaggaaaagccgacatggtaatgaaaggcttagtagacacatcaataatactaaaagcagttttaaataaagaagtaggtcttagaactggaaatgtattaagtcacgtagcagtatttgatgtagagggatatgatagattatttttcgtaactgacgcagctatgaacttagctcctgatacaaatactaaaaagcaaatcatagaaaatgcttgcacagtagcacattcattagatataagtgaaccaaaagttgctgcaatatgcgcaaaagaaaaagtaaatccaaaaatgaaagatacagttgaagctaaagaactagaagaaatgtatgaaagaggagaaatcaaaggttgtatggttggtgggccttttgcaattgataatgcagtatctttagaagcagctaaacataaaggtataaatcatcctgtagcaggacgagctgatatattattagccccagatattgaaggtggtaacatattatataaagctttggtattcttctcaaaatcaaaaaatgcaggagttatagttggggctaaagcaccaataatattaacttctagagcagacagtgaagaaactaaactaaactcaatagctttaggtgttttaatggcagcaaaggcataataagaaggagatatacatatgagcaaaatatttaaaatcttaacaataaatcctggttcgacatcaactaaaatagctgtatttgataatgaggatttagtatttgaaaaaactttaagacattcttcagaagaaataggaaaatatgagaaggtgtctgaccaatttgaatttcgtaaacaagtaatagaagaagctctaaaagaaggtggagtaaaaacatctgaattagatgctgtagtaggtagaggaggacttcttaaacctataaaaggtggtacttattcagtaagtgctgctatgattgaagatttaaaagtgggagttttaggagaacacgcttcaaacctaggtggaataatagcaaaacaaataggtgaagaagtaaatgttccttcatacatagtagaccctgttgttgtagatgaattagaagatgttgctagaatttctggtatgcctgaaataagtagagcaagtgtagtacatgctttaaatcaaaaggcaatagcaagaagatatgctagagaaataaacaagaaatatgaagatataaatcttatagttgcacacatgggtggaggagtttctgttggagctcataaaaatggtaaaatagtagatgttgcaaacgcattagatggagaaggacctttctctccagaaagaagtggtggactaccagtaggtgcattagtaaaaatgtgctttagtggaaaatatactcaagatgaaattaaaaagaaaataaaaggtaatggcggactagttgcatacttaaacactaatgatgctagagaagttgaagaaagaattgaagctggtgatgaaaaagctaaattagtatatgaagctatggcatatcaaatctctaaagaaataggagctagtgctgcagttcttaagggagatgtaaaagcaatattattaactggtggaatcgcatattcaaaaatgtttacagaaatgattgcagatagagttaaatttatagcagatgtaaaagtttatccaggtgaagatgaaatgattgcattagctcaaggtggacttagagttttaactggtgaagaagaggctcaagtttatgataactaataa

SEQ ID NO: 406 - DNA, 6224 bp, Artificial Sequence
  Description of Artificial Sequence: Synthetic polynucleotide
ctcgagttcattatccatcctccatcgccacgatagttcatggcgataggtagaatagcaatgaacgattatccctatcaagcattctgactgataattgctcacacgaattcattaaagaggagaaaggtaccatgatcgtaaaacctatggtacgcaacaatatctgcctgaacgcccatcctcagggctgcaagaagggagtggaagatcagattgaatataccaagaaacgcattaccgcagaagtcaaagctggcgcaaaagctccaaaaaacgttctggtgcttggctgctcaaatggttacggcctggcgagccgcattactgctgcgttcggatacggggctgcgaccatcggcgtgtcctttgaaaaagcgggttcagaaaccaaatatggtacaccgggatggtacaataatttggcatttgatgaagcggcaaaacgcgagggtctttatagcgtgacgatcgacggcgatgcgttttcagacgagatcaaggcccaggtaattgaggaagccaaaaaaaaaggtatcaaatttgatctgatcgtatacagcttggccagcccagtacgtactgatcctgatacaggtatcatgcacaaaagcgttttgaaaccctttggaaaaacgttcacaggcaaaacagtagatccgtttactggcgagctgaaggaaatctccgcggaaccagcaaatgacgaggaagcagccgccactgttaaagttatggggggtgaagattgggaacgttggattaagcagctgtcgaaggaaggcctcttagaagaaggctgtattaccttggcctatagttatattggccctgaagctacccaagctttgtaccgtaaaggcacaatcggcaaggccaaagaacacctggaggccacagcacaccgtctcaacaaagagaacccgtcaatccgtgccttcgtgagcgtgaataaaggcctggtaacccgcgcaagcgccgtaatcccggtaatccctctgtatctcgccagcttgttcaaagtaatgaaagagaagggcaatcatgaaggttgtattgaacagatcacgcgtctgtacgccgagcgcctgtaccgtaaagatggtacaattccagttgatgaggaaaatcgcattcgcattgatgattgggagttagaagaagacgtccagaaagcggtatccgcgttgatggagaaagtcacgggtgaaaacgcagaatctctcactgacttagcggggtaccgccatgatttcttagctagtaacggctttgatgtagaaggtattaattatgaagcggaagttgaacgcttcgaccgtatctgataagaaggagatatacatatgagagaagtagtaattgccagtgcagctagaacagcagtaggaagttttggaggagcatttaaatcagtttcagcggtagagttaggggtaacagcagctaaagaagctataaaaagagctaacataactccagatatgatagatgaatctcttttagggggagtacttacagcaggtcttggacaaaatatagcaagacaaatagcattaggagcaggaataccagtagaaaaaccagctatgactataaatatagtttgtggttctggattaagatctgtttcaatggcatctcaacttatagcattaggtgatgctgatataatgttagttggtggagctgaaaacatgagtatgtctccttatttagtaccaagtgcgagatatggtgcaagaatgggtgatgctgcttttgttgattcaatgataaaagatggattatcagacatatttaataactatcacatgggtattactgctgaaaacatagcagagcaatggaatataactagagaagaacaagatgaattagctcttgcaagtcaaaataaagctgaaaaagctcaagctgaaggaaaatttgatgaagaaatagttcctgttgttataaaaggaagaaaaggtgacactgtagtagataaagatgaatatattaagcctggcactacaatggagaaacttgctaagttaagacctgcatttaaaaaagatggaacagttactgctggtaatgcatcaggaataaatgatggtgctgctatgttagtagtaatggctaaagaaaaagctgaagaactaggaatagagcctcttgcaactatagtttcttatggaacagctggtgttgaccctaaaataatgggatatggaccagttccagcaactaaaaaagctttagaagctgctaatatgactattgaagatatagatttagttgaagctaatgaggcatttgctgcccaatctgtagctgtaataagagacttaaatatagatatgaataaagttaatgttaatggtggagcaatagctataggacatccaataggatgctcaggagcaagaatacttactacacttttatatgaaatgaagagaagagatgctaaaactggtcttgctacactttgtataggcggtggaatgggaactactttaatagttaagagatagtaagaaggagatatacatatgaaattagctgtaataggtagtggaactatgggaagtggtattgtacaaacttttgcaagttgtggacatgatgtatgtttaaagagtagaactcaaggtgctatagataaatgtttagctttattagataaaaatttaactaagttagttactaagggaaaaatggatgaagctacaaaagcagaaatattaagtcatgttagttcaactactaattatgaagatttaaaagatatggatttaataatagaagcatctgtagaagacatgaatataaagaaagatgttttcaagttactagatgaattatgtaaagaagatactatcttggcaacaaatacttcatcattatctataacagaaatagcttcttctactaagcgcccagataaagttataggaatgcatttctttaatccagttcctatgatgaaattagttgaagttataagtggtcagttaacatcaaaagttacttttgatacagtatttgaattatctaagagtatcaataaagtaccagtagatgtatctgaatctcctggatttgtagtaaatagaatacttatacctatgataaatgaagctgttggtatatatgcagatggtgttgcaagtaaagaagaaatagatgaagctatgaaattaggagcaaaccatccaatgggaccactagcattaggtgatttaatcggattagatgttgttttagctataatgaacgttttatatactgaatttggagatactaaatatagacctcatccacttttagctaaaatggttagagctaatcaattaggaagaaaaactaagataggattctatgattataataaataataagaaggagatatacatatgagtacaagtgatgttaaagtttatgagaatgtagctgttgaagtagatggaaatatatgtacagtgaaaatgaatagacctaaagcccttaatgcaataaattcaaagactttagaagaactttatgaagtatttgtagatattaataatgatgaaactattgatgttgtaatattgacaggggaaggaaaggcatttgtagctggagcagatattgcatacatgaaagatttagatgctgtagctgctaaagattttagtatcttaggagcaaaagcttttggagaaatagaaaatagtaaaaaagtagtgatagctgctgtaaacggatttgctttaggtggaggatgtgaacttgcaatggcatgtgatataagaattgcatctgctaaagctaaatttggtcagccagaagtaactcttggaataactccaggatatggaggaactcaaaggcttacaagattggttggaatggcaaaagcaaaagaattaatctttacaggtcaagttataaaagctgatgaagctgaaaaaatagggctagtaaatagagtcgttgagccagacattttaatagaagaagttgagaaattagctaagataatagctaaaaatgctcagcttgcagttagatactctaaagaagcaatacaacttggtgctcaaactgatataaatactggaatagatatagaatctaatttatttggtctttgtttttcaactaaagaccaaaaagaaggaatgtcagctttcgttgaaaagagagaagctaactttataaaagggtaataagaaggagatatacatatgagaagttttgaagaagtaattaagtttgcaaaagaaagaggacctaaaactatatcagtagcatgttgccaagataaagaagttttaatggcagttgaaatggctagaaaagaaaaaatagcaaatgccattttagtaggagatatagaaaagactaaagaaattgcaaaaagcatagacatggatatcgaaaattatgaactgatagatataaaagatttagcagaagcatctctaaaatctgttgaattagtttcacaaggaaaagccgacatggtaatgaaaggcttagtagacacatcaataatactaaaagcagttttaaataaagaagtaggtcttagaactggaaatgtattaagtcacgtagcagtatttgatgtagagggatatgatagattatttttcgtaactgacgcagctatgaacttagctcctgatacaaatactaaaaagcaaatcatagaaaatgcttgcacagtagcacattcattagatataagtgaaccaaaagttgctgcaatatgcgcaaaagaaaaagtaaatccaaaaatgaaagatacagttgaagctaaagaactagaagaaatgtatgaaagaggagaaatcaaaggttgtatggttggtgggccttttgcaattgataatgcagtatctttagaagcagctaaacataaaggtataaatcatcctgtagcaggacgagctgatatattattagccccagatattgaaggtggtaacatattatataaagctttggtattcttctcaaaatcaaaaaatgcaggagttatagttggggctaaagcaccaataatattaacttctagagcagacagtgaagaaactaaactaaactcaatagctttaggtgttttaatggcagcaaaggcataataagaaggagatatacatatgagcaaaatatttaaaatcttaacaataaatcctggttcgacatcaactaaaatagctgtatttgataatgaggatttagtatttgaaaaaactttaagacattcttcagaagaaataggaaaatatgagaaggtgtctgaccaatttgaatttcgtaaacaagtaatagaagaagctctaaaagaaggtggagtaaaaacatctgaattagatgctgtagtaggtagaggaggacttcttaaacctataaaaggtggtacttattcagtaagtgctgctatgattgaagatttaaaagtgggagttttaggagaacacgcttcaaacctaggtggaataatagcaaaacaaataggtgaagaagtaaatgttccttcatacatagtagaccctgttgttgtagatgaattagaagatgttgctagaatttctggtatgcctgaaataagtagagcaagtgtagtacatgctttaaatcaaaaggcaatagcaagaagatatgctagagaaataaacaagaaatatgaagatataaatcttatagttgcacacatgggtggaggagtttctgttggagctcataaaaatggtaaaatagtagatgttgcaaacgcattagatggagaaggacctttctctccagaaagaagtggtggactaccagtaggtgcattagtaaaaatgtgctttagtggaaaatatactcaagatgaaattaaaaagaaaataaaaggtaatggcggactagttgcatacttaaacactaatgatgctagagaagttgaagaaagaattgaagctggtgatgaaaaagctaaattagtatatgaagctatggcatatcaaatctctaaagaaataggagctagtgctgcagttcttaagggagatgtaaaagcaatattattaactggtggaatcgcatattcaaaaatgtttacagaaatgattgcagatagagttaaatttatagcagatgtaaaagtttatccaggtgaagatgaaatgattgcattagctcaaggtggacttagagttttaactggtgaagaagaggctcaagtttatgataactaataa

SEQ ID NO: 407 - DNA, 3118 bp, Artificial Sequence
  Description of Artificial Sequence: Synthetic polynucleotide
ctcgagatgctagcaattgtgagcggataacaattgacattgtgagcggataacaagatactgagcacatcagcaggacgcactgaccttaattaaaagaattcattaaagaggagaaaggtaccatgaatattcgtgatcttgagtacctggtggcattggctgaacaccgccattttcggcgtgcggcagattcctgccacgttagccagccgacgcttagcgggcaaattcgtaagctggaagatgagctgggcgtgatgttgctggagcggaccagccgtaaagtgttgttcacccaggcgggaatgctgctggtggatcaggcgcgtaccgtgctgcgtgaggtgaaagtccttaaagagatggcaagccagcagggcgagacgatgtccggaccgctgcacattggtttgattcccacagttggaccgtacctgctaccgcatattatccctatgctgcaccagacctttccaaagctggaaatgtatctgcatgaagcacagacccaccagttactggcgcaactggacagcggcaaactcgattgcgtgatcctcgcgctggtgaaagagagcgaagcattcattgaagtgccgttgtttgatgagccaatgttgctggctatctatgaagatcacccgtgggcgaaccgcgaatgcgtaccgatggccgatctggcaggggaaaaactgctgatgctggaagatggtcactgtttgcgcgatcaggcaatgggtttctgttttgaagccggggcggatgaagatacacacttccgcgcgaccagcctggaaactctgcgcaacatggtggcggcaggtagcgggatcactttactgccagcgctggctgtgccgccggagcgcaaacgcgatggggttgtttatctgccgtgcattaagccggaaccacgccgcactattggcctggtttatcgtcctggctcaccgctgcgcagccgctatgagcagctggcagaggccatccgcgcaagaatggatggccatttcgataaagttttaaaacaggcggtttaaggatcccatggtacgcgtgctagaggcatcaaataaaacgaaaggctcagtcgaaagactgggcctttcgttttatctgttgtttgtcggtgaacgctctcctgagtaggacaaatccgccgccctagacctaggggatatattccgcttcctcgctcactgactcgctacgctcggtcgttcgactgcggcgagcggaaatggcttacgaacggggcggagatttcctggaagatgccaggaagatacttaacagggaagtgagagggccgcggcaaagccgtttttccataggctccgcccccctgacaagcatcacgaaatctgacgctcaaatcagtggtggcgaaacccgacaggactataaagataccaggcgtttccccctggcggctccctcgtgcgctctcctgttcctgcctttcggtttaccggtgtcattccgctgttatggccgcgtttgtctcattccacgcctgacactcagttccgggtaggcagttcgctccaagctggactgtatgcacgaaccccccgttcagtccgaccgctgcgccttatccggtaactatcgtcttgagtccaacccggaaagacatgcaaaagcaccactggcagcagccactggtaattgatttagaggagttagtcttgaagtcatgcgccggttaaggctaaactgaaaggacaagttttggtgactgcgctcctccaagccagttacctcggttcaaagagttggtagctcagagaaccttcgaaaaaccgccctgcaaggcggttttttcgttttcagagcaagagattacgcgcagaccaaaacgatctcaagaagatcatcttattaatcagataaaatatttctagatttcagtgcaatttatctcttcaaatgtagcacctgaagtcagccccatacgatataagttgttactagtgcttggattctcaccaataaaaaacgcccggcggcaaccgagcgttctgaacaaatccagatggagttctgaggtcattactggatctatcaacaggagtccaagcgagctctcgaaccccagagtcccgctcagaagaactcgtcaagaaggcgatagaaggcgatgcgctgcgaatcgggagcggcgataccgtaaagcacgaggaagcggtcagcccattcgccgccaagctcttcagcaatatcacgggtagccaacgctatgtcctgatagcggtccgccacacccagccggccacagtcgatgaatccagaaaagcggccattttccaccatgatattcggcaagcaggcatcgccatgggtcacgacgagatcctcgccgtcgggcatgcgcgccttgagcctggcgaacagttcggctggcgcgagcccctgatgctcttcgtccagatcatcctgatcgacaagaccggcttccatccgagtacgtgctcgctcgatgcgatgtttcgcttggtggtcgaatgggcaggtagccggatcaagcgtatgcagccgccgcattgcatcagccatgatggatactttctcggcaggagcaaggtgagatgacaggagatcctgccccggcacttcgcccaatagcagccagtcccttcccgcttcagtgacaacgtcgagcacagctgcgcaaggaacgcccgtcgtggccagccacgatagccgcgctgcctcgtcctgcagttcattcagggcaccggacaggtcggtcttgacaaaaagaaccgggcgcccctgcgctgacagccggaacacggcggcatcagagcagccgattgtctgttgtgcccagtcatagccgaatagcctctccacccaagcggccggagaacctgcgtgcaatccatcttgttcaatcatgcgaaacgatcctcatcctgtctcttgatcagatcttgatcccctgcgccatcagatccttggcggcaagaaagccatccagtttactttgcagggcttcccaaccttaccagagggcgccccagctggcaattccgacgtctaagaaaccattattatcatgacattaacctataaaaataggcgtatcacgaggccctttcgtcttcac

SEQ ID NO: 408 - DNA, 5081 bp, Artificial Sequence
  Description of Artificial Sequence: Synthetic polynucleotide
ctcgagttcattatccatcctccatcgccacgatagttcatggcgataggtagaatagcaatgaacgattatccctatcaagcattctgactgataattgctcacacgaattcattaaagaggagaaaggtaccatgatcgtaaaacctatggtacgcaacaatatctgcctgaacgcccatcctcagggctgcaagaagggagtggaagatcagattgaatataccaagaaacgcattaccgcagaagtcaaagctggcgcaaaagctccaaaaaacgttctggtgcttggctgctcaaatggttacggcctggcgagccgcattactgctgcgttcggatacggggctgcgaccatcggcgtgtcctttgaaaaagcgggttcagaaaccaaatatggtacaccgggatggtacaataatttggcatttgatgaagcggcaaaacgcgagggtctttatagcgtgacgatcgacggcgatgcgttttcagacgagatcaaggcccaggtaattgaggaagccaaaaaaaaaggtatcaaatttgatctgatcgtatacagcttggccagcccagtacgtactgatcctgatacaggtatcatgcacaaaagcgttttgaaaccctttggaaaaacgttcacaggcaaaacagtagatccgtttactggcgagctgaaggaaatctccgcggaaccagcaaatgacgaggaagcagccgccactgttaaagttatggggggtgaagattgggaacgttggattaagcagctgtcgaaggaaggcctcttagaagaaggctgtattaccttggcctatagttatattggccctgaagctacccaagctttgtaccgtaaaggcacaatcggcaaggccaaagaacacctggaggccacagcacaccgtctcaacaaagagaacccgtcaatccgtgccttcgtgagcgtgaataaaggcctggtaacccgcgcaagcgccgtaatcccggtaatccctctgtatctcgccagcttgttcaaagtaatgaaagagaagggcaatcatgaaggttgtattgaacagatcacgcgtctgtacgccgagcgcctgtaccgtaaagatggtacaattccagttgatgaggaaaatcgcattcgcattgatgattgggagttagaagaagacgtccagaaagcggtatccgcgttgatggagaaagtcacgggtgaaaacgcagaatctctcactgacttagcggggtaccgccatgatttcttagctagtaacggctttgatgtagaaggtattaattatgaagcggaagttgaacgcttcgaccgtatctgataagaaggagatatacatatgagagaagtagtaattgccagtgcagctagaacagcagtaggaagttttggaggagcatttaaatcagtttcagcggtagagttaggggtaacagcagctaaagaagctataaaaagagctaacataactccagatatgatagatgaatctcttttagggggagtacttacagcaggtcttggacaaaatatagcaagacaaatagcattaggagcaggaataccagtagaaaaaccagctatgactataaatatagtttgtggttctggattaagatctgtttcaatggcatctcaacttatagcattaggtgatgctgatataatgttagttggtggagctgaaaacatgagtatgtctccttatttagtaccaagtgcgagatatggtgcaagaatgggtgatgctgcttttgttgattcaatgataaaagatggattatcagacatatttaataactatcacatgggtattactgctgaaaacatagcagagcaatggaatataactagagaagaacaagatgaattagctcttgcaagtcaaaataaagctgaaaaagctcaagctgaaggaaaatttgatgaagaaatagttcctgttgttataaaaggaagaaaaggtgacactgtagtagataaagatgaatatattaagcctggcactacaatggagaaacttgctaagttaagacctgcatttaaaaaagatggaacagttactgctggtaatgcatcaggaataaatgatggtgctgctatgttagtagtaatggctaaagaaaaagctgaagaactaggaatagagcctcttgcaactatagtttcttatggaacagctggtgttgaccctaaaataatgggatatggaccagttccagcaactaaaaaagctttagaagctgctaatatgactattgaagatatagatttagttgaagctaatgaggcatttgctgcccaatctgtagctgtaataagagacttaaatatagatatgaataaagttaatgttaatggtggagcaatagctataggacatccaataggatgctcaggagcaagaatacttactacacttttatatgaaatgaagagaagagatgctaaaactggtcttgctacactttgtataggcggtggaatgggaactactttaatagttaagagatagtaagaaggagatatacatatgaaattagctgtaataggtagtggaactatgggaagtggtattgtacaaacttttgcaagttgtggacatgatgtatgtttaaagagtagaactcaaggtgctatagataaatgtttagctttattagataaaaatttaactaagttagttactaagggaaaaatggatgaagctacaaaagcagaaatattaagtcatgttagttcaactactaattatgaagatttaaaagatatggatttaataatagaagcatctgtagaagacatgaatataaagaaagatgttttcaagttactagatgaattatgtaaagaagatactatcttggcaacaaatacttcatcattatctataacagaaatagcttcttctactaagcgcccagataaagttataggaatgcatttctttaatccagttcctatgatgaaattagttgaagttataagtggtcagttaacatcaaaagttacttttgatacagtatttgaattatctaagagtatcaataaagtaccagtagatgtatctgaatctcctggatttgtagtaaatagaatacttatacctatgataaatgaagctgttggtatatatgcagatggtgttgcaagtaaagaagaaatagatgaagctatgaaattaggagcaaaccatccaatgggaccactagcattaggtgatttaatcggattagatgttgttttagctataatgaacgttttatatactgaatttggagatactaaatatagacctcatccacttttagctaaaatggttagagctaatcaattaggaagaaaaactaagataggattctatgattataataaataataagaaggagatatacatatgagtacaagtgatgttaaagtttatgagaatgtagctgttgaagtagatggaaatatatgtacagtgaaaatgaatagacctaaagcccttaatgcaataaattcaaagactttagaagaactttatgaagtatttgtagatattaataatgatgaaactattgatgttgtaatattgacaggggaaggaaaggcatttgtagctggagcagatattgcatacatgaaagatttagatgctgtagctgctaaagattttagtatcttaggagcaaaagcttttggagaaatagaaaatagtaaaaaagtagtgatagctgctgtaaacggatttgctttaggtggaggatgtgaacttgcaatggcatgtgatataagaattgcatctgctaaagctaaatttggtcagccagaagtaactcttggaataactccaggatatggaggaactcaaaggcttacaagattggttggaatggcaaaagcaaaagaattaatctttacaggtcaagttataaaagctgatgaagctgaaaaaatagggctagtaaatagagtcgttgagccagacattttaatagaagaagttgagaaattagctaagataatagctaaaaatgctcagcttgcagttagatactctaaagaagcaatacaacttggtgctcaaactgatataaatactggaatagatatagaatctaatttatttggtctttgtttttcaactaaagaccaaaaagaaggaatgtcagctttcgttgaaaagagagaagctaactttataaaagggtaataagaaggagatatacatatgagtcaggcgctaaaaaatttactgacattgttaaatctggaaaaaattgaggaaggactctttcgcggccagagtgaagatttaggtttacgccaggtgtttggcggccaggtcgtgggtcaggccttgtatgctgcaaaagagaccgtccctgaagagcggctggtacattcgtttcacagctactttcttcgccctggcgatagtaagaagccgattatttatgatgtcgaaacgctgcgtgacggtaacagcttcagcgcccgccgggttgctgctattcaaaacggcaaaccgattttttatatgactgcctctttccaggcaccagaagcgggtttcgaacatcaaaaaacaatgccgtccgcgccagcgcctgatggcctcccttcggaaacgcaaatcgcccaatcgctggcgcacctgctgccgccagtgctgaaagataaattcatctgcgatcgtccgctggaagtccgtccggtggagtttcataacccactgaaaggtcacgtcgcagaaccacatcgtcaggtgtggatccgcgcaaatggtagcgtgccggatgacctgcgcgttcatcagtatctgctcggttacgcttctgatcttaacttcctgccggtagctctacagccgcacggcatcggttttctcgaaccggggattcagattgccaccattgaccattccatgtggttccatcgcccgtttaatttgaatgaatggctgctgtatagcgtggagagcacctcggcgtccagcgcacgtggctttgtgcgcggtgagttttatacccaagacggcgtactggttgcctcgaccgttcaggaaggggtgatgcgtaatcacaattaa

SEQ ID NO: 409-415 - skipped (7 entries)

SEQ ID NO: 416 - DNA, 5160 bp, Artificial Sequence
  Description of Artificial Sequence: Synthetic polynucleotide
ggtaccagttgttcttattggtggtgttgctttatggttgcatcgtagtaaatggttgtaacaaaagcaatttttccggctgtctgtatacaaaaacgccgcaaagtttgagcgaagtcaataaactctctacccattcagggcaatatctctcttggatccaaagtgaactctagaaataattttgtttaactttaagaaggagatatacatatgatcgtaaaacctatggtacgcaacaatatctgcctgaacgcccatcctcagggctgcaagaagggagtggaagatcagattgaatataccaagaaacgcattaccgcagaagtcaaagctggcgcaaaagctccaaaaaacgttctggtgcttggctgctcaaatggttacggcctggcgagccgcattactgctgcgttcggatacggggctgcgaccatcggcgtgtcctttgaaaaagcgggttcagaaaccaaatatggtacaccgggatggtacaataatttggcatttgatgaagcggcaaaacgcgagggtctttatagcgtgacgatcgacggcgatgcgttttcagacgagatcaaggcccaggtaattgaggaagccaaaaaaaaaggtatcaaatttgatctgatcgtatacagcttggccagcccagtacgtactgatcctgatacaggtatcatgcacaaaagcgttttgaaaccctttggaaaaacgttcacaggcaaaacagtagatccgtttactggcgagctgaaggaaatctccgcggaaccagcaaatgacgaggaagcagccgccactgttaaagttatggggggtgaagattgggaacgttggattaagcagctgtcgaaggaaggcctcttagaagaaggctgtattaccttggcctatagttatattggccctgaagctacccaagctttgtaccgtaaaggcacaatcggcaaggccaaagaacacctggaggccacagcacaccgtctcaacaaagagaacccgtcaatccgtgccttcgtgagcgtgaataaaggcctggtaacccgcgcaagcgccgtaatcccggtaatccctctgtatctcgccagcttgttcaaagtaatgaaagagaagggcaatcatgaaggttgtattgaacagatcacgcgtctgtacgccgagcgcctgtaccgtaaagatggtacaattccagttgatgaggaaaatcgcattcgcattgatgattgggagttagaagaagacgtccagaaagcggtatccgcgttgatggagaaagtcacgggtgaaaacgcagaatctctcactgacttagcggggtaccgccatgatttcttagctagtaacggctttgatgtagaaggtattaattatgaagcggaagttgaacgcttcgaccgtatctgataagaaggagatatacatatgagagaagtagtaattgccagtgcagctagaacagcagtaggaagttttggaggagcatttaaatcagtttcagcggtagagttaggggtaacagcagctaaagaagctataaaaagagctaacataactccagatatgatagatgaatctcttttagggggagtacttacagcaggtcttggacaaaatatagcaagacaaatagcattaggagcaggaataccagtagaaaaaccagctatgactataaatatagtttgtggttctggattaagatctgtttcaatggcatctcaacttatagcattaggtgatgctgatataatgttagttggtggagctgaaaacatgagtatgtctccttatttagtaccaagtgcgagatatggtgcaagaatgggtgatgctgcttttgttgattcaatgataaaagatggattatcagacatatttaataactatcacatgggtattactgctgaaaacatagcagagcaatggaatataactagagaagaacaagatgaattagctcttgcaagtcaaaataaagctgaaaaagctcaagctgaaggaaaatttgatgaagaaatagttcctgttgttataaaaggaagaaaaggtgacactgtagtagataaagatgaatatattaagcctggcactacaatggagaaacttgctaagttaagacctgcatttaaaaaagatggaacagttactgctggtaatgcatcaggaataaatgatggtgctgctatgttagtagtaatggctaaagaaaaagctgaagaactaggaatagagcctcttgcaactatagtttcttatggaacagctggtgttgaccctaaaataatgggatatggaccagttccagcaactaaaaaagctttagaagctgctaatatgactattgaagatatagatttagttgaagctaatgaggcatttgctgcccaatctgtagctgtaataagagacttaaatatagatatgaataaagttaatgttaatggtggagcaatagctataggacatccaataggatgctcaggagcaagaatacttactacacttttatatgaaatgaagagaagagatgctaaaactggtcttgctacactttgtataggcggtggaatgggaactactttaatagttaagagatagtaagaaggagatatacatatgaaattagctgtaataggtagtggaactatgggaagtggtattgtacaaacttttgcaagttgtggacatgatgtatgtttaaagagtagaactcaaggtgctatagataaatgtttagctttattagataaaaatttaactaagttagttactaagggaaaaatggatgaagctacaaaagcagaaatattaagtcatgttagttcaactactaattatgaagatttaaaagatatggatttaataatagaagcatctgtagaagacatgaatataaagaaagatgttttcaagttactagatgaattatgtaaagaagatactatcttggcaacaaatacttcatcattatctataacagaaatagcttcttctactaagcgcccagataaagttataggaatgcatttctttaatccagttcctatgatgaaattagttgaagttataagtggtcagttaacatcaaaagttacttttgatacagtatttgaattatctaagagtatcaataaagtaccagtagatgtatctgaatctcctggatttgtagtaaatagaatacttatacctatgataaatgaagctgttggtatatatgcagatggtgttgcaagtaaagaagaaatagatgaagctatgaaattaggagcaaaccatccaatgggaccactagcattaggtgatttaatcggattagatgttgttttagctataatgaacgttttatatactgaatttggagatactaaatatagacctcatccacttttagctaaaatggttagagctaatcaattaggaagaaaaactaagataggattctatgattataataaataataagaaggagatatacatatgagtacaagtgatgttaaagtttatgagaatgtagctgttgaagtagatggaaatatatgtacagtgaaaatgaatagacctaaagcccttaatgcaataaattcaaagactttagaagaactttatgaagtatttgtagatattaataatgatgaaactattgatgttgtaatattgacaggggaaggaaaggcatttgtagctggagcagatattgcatacatgaaagatttagatgctgtagctgctaaagattttagtatcttaggagcaaaagcttttggagaaatagaaaatagtaaaaaagtagtgatagctgctgtaaacggatttgctttaggtggaggatgtgaacttgcaatggcatgtgatataagaattgcatctgctaaagctaaatttggtcagccagaagtaactcttggaataactccaggatatggaggaactcaaaggcttacaagattggttggaatggcaaaagcaaaagaattaatctttacaggtcaagttataaaagctgatgaagctgaaaaaatagggctagtaaatagagtcgttgagccagacattttaatagaagaagttgagaaattagctaagataatagctaaaaatgctcagcttgcagttagatactctaaagaagcaatacaacttggtgctcaaactgatataaatactggaatagatatagaatctaatttatttggtctttgtttttcaactaaagaccaaaaagaaggaatgtcagctttcgttgaaaagagagaagctaactttataaaagggtaataagaaggagatatacatatgagtcaggcgctaaaaaatttactgacattgttaaatctggaaaaaattgaggaaggactctttcgcggccagagtgaagatttaggtttacgccaggtgtttggcggccaggtcgtgggtcaggccttgtatgctgcaaaagagaccgtccctgaagagcggctggtacattcgtttcacagctactttcttcgccctggcgatagtaagaagccgattatttatgatgtcgaaacgctgcgtgacggtaacagcttcagcgcccgccgggttgctgctattcaaaacggcaaaccgattttttatatgactgcctctttccaggcaccagaagcgggtttcgaacatcaaaaaacaatgccgtccgcgccagcgcctgatggcctcccttcggaaacgcaaatcgcccaatcgctggcgcacctgctgccgccagtgctgaaagataaattcatctgcgatcgtccgctggaagtccgtccggtggagtttcataacccactgaaaggtcacgtcgcagaaccacatcgtcaggtgtggatccgcgcaaatggtagcgtgccggatgacctgcgcgttcatcagtatctgctcggttacgcttctgatcttaacttcctgccggtagctctacagccgcacggcatcggttttctcgaaccggggattcagattgccaccattgaccattccatgtggttccatcgcccgtttaatttgaatgaatggctgctgtatagcgtggagagcacctcggcgtccagcgcacgtggctttgtgcgcggtgagttttatacccaagacggcgtactggttgcctcgaccgttcaggaaggggtgatgcgtaatcacaattaa

SEQ ID NO: 417 - DNA, 6300 bp, Artificial Sequence
  Description of Artificial Sequence: Synthetic polynucleotide
ggtaccagttgttcttattggtggtgttgctttatggttgcatcgtagtaaatggttgtaacaaaagcaatttttccggctgtctgtatacaaaaacgccgcaaagtttgagcgaagtcaataaactctctacccattcagggcaatatctctcttggatccaaagtgaactctagaaataattttgtttaactttaagaaggagatatacatatgatcgtaaaacctatggtacgcaacaatatctgcctgaacgcccatcctcagggctgcaagaagggagtggaagatcagattgaatataccaagaaacgcattaccgcagaagtcaaagctggcgcaaaagctccaaaaaacgttctggtgcttggctgctcaaatggttacggcctggcgagccgcattactgctgcgttcggatacggggctgcgaccatcggcgtgtcctttgaaaaagcgggttcagaaaccaaatatggtacaccgggatggtacaataatttggcatttgatgaagcggcaaaacgcgagggtctttatagcgtgacgatcgacggcgatgcgttttcagacgagatcaaggcccaggtaattgaggaagccaaaaaaaaaggtatcaaatttgatctgatcgtatacagcttggccagcccagtacgtactgatcctgatacaggtatcatgcacaaaagcgttttgaaaccctttggaaaaacgttcacaggcaaaacagtagatccgtttactggcgagctgaaggaaatctccgcggaaccagcaaatgacgaggaagcagccgccactgttaaagttatggggggtgaagattgggaacgttggattaagcagctgtcgaaggaaggcctcttagaagaaggctgtattaccttggcctatagttatattggccctgaagctacccaagctttgtaccgtaaaggcacaatcggcaaggccaaagaacacctggaggccacagcacaccgtctcaacaaagagaacccgtcaatccgtgccttcgtgagcgtgaataaaggcctggtaacccgcgcaagcgccgtaatcccggtaatccctctgtatctcgccagcttgttcaaagtaatgaaagagaagggcaatcatgaaggttgtattgaacagatcacgcgtctgtacgccgagcgcctgtaccgtaaagatggtacaattccagttgatgaggaaaatcgcattcgcattgatgattgggagttagaagaagacgtccagaaagcggtatccgcgttgatggagaaagtcacgggtgaaaacgcagaatctctcactgacttagcggggtaccgccatgatttcttagctagtaacggctttgatgtagaaggtattaattatgaagcggaagttgaacgcttcgaccgtatctgataagaaggagatatacatatgagagaagtagtaattgccagtgcagctagaacagcagtaggaagttttggaggagcatttaaatcagtttcagcggtagagttaggggtaacagcagctaaagaagctataaaaagagctaacataactccagatatgatagatgaatctcttttagggggagtacttacagcaggtcttggacaaaatatagcaagacaaatagcattaggagcaggaataccagtagaaaaaccagctatgactataaatatagtttgtggttctggattaagatctgtttcaatggcatctcaacttatagcattaggtgatgctgatataatgttagttggtggagctgaaaacatgagtatgtctccttatttagtaccaagtgcgagatatggtgcaagaatgggtgatgctgcttttgttgattcaatgataaaagatggattatcagacatatttaataactatcacatgggtattactgctgaaaacatagcagagcaatggaatataactagagaagaacaagatgaattagctcttgcaagtcaaaataaagctgaaaaagctcaagctgaaggaaaatttgatgaagaaatagttcctgttgttataaaaggaagaaaaggtgacactgtagtagataaagatgaatatattaagcctggcactacaatggagaaacttgctaagttaagacctgcatttaaaaaagatggaacagttactgctggtaatgcatcaggaataaatgatggtgctgctatgttagtagtaatggctaaagaaaaagctgaagaactaggaatagagcctcttgcaactatagtttcttatggaacagctggtgttgaccctaaaataatgggatatggaccagttccagcaactaaaaaagctttagaagctgctaatatgactattgaagatatagatttagttgaagctaatgaggcatttgctgcccaatctgtagctgtaataagagacttaaatatagatatgaataaagttaatgttaatggtggagcaatagctataggacatccaataggatgctcaggagcaagaatacttactacacttttatatgaaatgaagagaagagatgctaaaactggtcttgctacactttgtataggcggtggaatgggaactactttaatagttaagagatagtaagaaggagatatacatatgaaattagctgtaataggtagtggaactatgggaagtggtattgtacaaacttttgcaagttgtggacatgatgtatgtttaaagagtagaactcaaggtgctatagataaatgtttagctttattagataaaaatttaactaagttagttactaagggaaaaatggatgaagctacaaaagcagaaatattaagtcatgttagttcaactactaattatgaagatttaaaagatatggatttaataatagaagcatctgtagaagacatgaatataaagaaagatgttttcaagttactagatgaattatgtaaagaagatactatcttggcaacaaatacttcatcattatctataacagaaatagcttcttctactaagcgcccagataaagttataggaatgcatttctttaatccagttcctatgatgaaattagttgaagttataagtggtcagttaacatcaaaagttacttttgatacagtatttgaattatctaagagtatcaataaagtaccagtagatgtatctgaatctcctggatttgtagtaaatagaatacttatacctatgataaatgaagctgttggtatatatgcagatggtgttgcaagtaaagaagaaatagatgaagctatgaaattaggagcaaaccatccaatgggaccactagcattaggtgatttaatcggattagatgttgttttagctataatgaacgttttatatactgaatttggagatactaaatatagacctcatccacttttagctaaaatggttagagctaatcaattaggaagaaaaactaagataggattctatgattataataaataataagaaggagatatacatatgagtacaagtgatgttaaagtttatgagaatgtagctgttgaagtagatggaaatatatgtacagtgaaaatgaatagacctaaagcccttaatgcaataaattcaaagactttagaagaactttatgaagtatttgtagatattaataatgatgaaactattgatgttgtaatattgacaggggaaggaaaggcatttgtagctggagcagatattgcatacatgaaagatttagatgctgtagctgctaaagattttagtatcttaggagcaaaagcttttggagaaatagaaaatagtaaaaaagtagtgatagctgctgtaaacggatttgctttaggtggaggatgtgaacttgcaatggcatgtgatataagaattgcatctgctaaagctaaatttggtcagccagaagtaactcttggaataactccaggatatggaggaactcaaaggcttacaagattggttggaatggcaaaagcaaaagaattaatctttacaggtcaagttataaaagctgatgaagctgaaaaaatagggctagtaaatagagtcgttgagccagacattttaatagaagaagttgagaaattagctaagataatagctaaaaatgctcagcttgcagttagatactctaaagaagcaatacaacttggtgctcaaactgatataaatactggaatagatatagaatctaatttatttggtctttgtttttcaactaaagaccaaaaagaaggaatgtcagctttcgttgaaaagagagaagctaactttataaaagggtaataagaaggagatatacatatgagaagttttgaagaagtaattaagtttgcaaaagaaagaggacctaaaactatatcagtagcatgttgccaagataaagaagttttaatggcagttgaaatggctagaaaagaaaaaatagcaaatgccattttagtaggagatatagaaaagactaaagaaattgcaaaaagcatagacatggatatcgaaaattatgaactgatagatataaaagatttagcagaagcatctctaaaatctgttgaattagtttcacaaggaaaagccgacatggtaatgaaaggcttagtagacacatcaataatactaaaagcagttttaaataaagaagtaggtcttagaactggaaatgtattaagtcacgtagcagtatttgatgtagagggatatgatagattatttttcgtaactgacgcagctatgaacttagctcctgatacaaatactaaaaagcaaatcatagaaaatgcttgcacagtagcacattcattagatataagtgaaccaaaagttgctgcaatatgcgcaaaagaaaaagtaaatccaaaaatgaaagatacagttgaagctaaagaactagaagaaatgtatgaaagaggagaaatcaaaggttgtatggttggtgggccttttgcaattgataatgcagtatctttagaagcagctaaacataaaggtataaatcatcctgtagcaggacgagctgatatattattagccccagatattgaaggtggtaacatattatataaagctttggtattcttctcaaaatcaaaaaatgcaggagttatagttggggctaaagcaccaataatattaacttctagagcagacagtgaagaaactaaactaaactcaatagctttaggtgttttaatggcagcaaaggcataataagaaggagatatacatatgagcaaaatatttaaaatcttaacaataaatcctggttcgacatcaactaaaatagctgtatttgataatgaggatttagtatttgaaaaaactttaagacattcttcagaagaaataggaaaatatgagaaggtgtctgaccaatttgaatttcgtaaacaagtaatagaagaagctctaaaagaaggtggagtaaaaacatctgaattagatgctgtagtaggtagaggaggacttcttaaacctataaaaggtggtacttattcagtaagtgctgctatgattgaagatttaaaagtgggagttttaggagaacacgcttcaaacctaggtggaataatagcaaaacaaataggtgaagaagtaaatgttccttcatacatagtagaccctgttgttgtagatgaattagaagatgttgctagaatttctggtatgcctgaaataagtagagcaagtgtagtacatgctttaaatcaaaaggcaatagcaagaagatatgctagagaaataaacaagaaatatgaagatataaatcttatagttgcacacatgggtggaggagtttctgttggagctcataaaaatggtaaaatagtagatgttgcaaacgcattagatggagaaggacctttctctccagaaagaagtggtggactaccagtaggtgcattagtaaaaatgtgctttagtggaaaatatactcaagatgaaattaaaaagaaaataaaaggtaatggcggactagttgcatacttaaacactaatgatgctagagaagttgaagaaagaattgaagctggtgatgaaaaagctaaattagtatatgaagctatggcatatcaaatctctaaagaaataggagctagtgctgcagttcttaagggagatgtaaaagcaatattattaactggtggaatcgcatattcaaaaatgtttacagaaatgattgcagatagagttaaatttatagcagatgtaaaagtttatccaggtgaagatgaaatgattgcattagctcaaggtggacttagagttttaactggtgaagaagaggctcaagtttatgataactaa

SEQ ID NO: 418 - DNA, 213 bp, Artificial Sequence
  Description of Artificial Sequence: Synthetic polynucleotide
ggtaccagttgttcttattggtggtgttgctttatggttgcatcgtagtaaatggttgtaacaaaagcaatttttccggctgtctgtatacaaaaacgccgcaaagtttgagcgaagtcaataaactctctacccattcagggcaatatctctcttggatccaaagtgaactctagaaataattttgtttaactttaagaaggagatatacat

SEQ ID NO: 419 - DNA, 43 bp, Artificial Sequence
  Description of Artificial Sequence: Synthetic oligonucleotide
ctctagaaataattttgtttaactttaagaaggagatatacat

SEQ ID NO: 420-422 - skipped (3 entries)

SEQ ID NO: 423 - DNA, 3383 bp, Artificial Sequence
  Description of Artificial Sequence: Synthetic polynucleotide
ggtaccgtcagcataacaccctgacctctcattaattgttcatgccgggcggcactatcgtcgtccggccttttcctctcttactctgctacgtacatctatttctataaatccgttcaatttgtctgttttttgcacaaacatgaaatatcagacaattccgtgacttaagaaaatttatacaaatcagcaatataccccttaaggagtatataaaggtgaatttgatttacatcaataagcggggttgctgaatcgttaaggtaggcggtaatagaaaagaaatcgaggcaaaaatgagcaaagtcagactcgcaattatggatcctctggccgtcgtattacaacgtcgtgactgggaaaaccctggcgttacccaacttaatcgccttgcggcacatccccctttcgccagctggcgtaatagcgaagaggcccgcaccgatcgcccttcccaacagttgcgcagcctgaatggcgaatggcgctttgcctggtttccggcaccagaagcggtgccggaaagctggctggagtgcgatcttcctgacgccgatactgtcgtcgtcccctcaaactggcagatgcacggttacgatgcgcctatctacaccaacgtgacctatcccattacggtcaatccgccgtttgttcccgcggagaatccgacaggttgttactcgctcacatttaatattgatgaaagctggctacaggaaggccagacgcgaattatttttgatggcgttaactcggcgtttcatctgtggtgcaacgggcgctgggtcggttacggccaggacagccgtttgccgtctgaatttgacctgagcgcatttttacgcgccggagaaaaccgcctcgcggtgatggtgctgcgctggagtgacggcagttatctggaagatcaggatatgtggcggatgagcggcattttccgtgacgtctcgttgctgcataaaccgaccacgcaaatcagcgatttccaagttaccactctctttaatgatgatttcagccgcgcggtactggaggcagaagttcagatgtacggcgagctgcgcgatgaactgcgggtgacggtttctttgtggcagggtgaaacgcaggtcgccagcggcaccgcgcctttcggcggtgaaattatcgatgagcgtggcggttatgccgatcgcgtcacactacgcctgaacgttgaaaatccggaactgtggagcgccgaaatcccgaatctctatcgtgcagtggttgaactgcacaccgccgacggcacgctgattgaagcagaagcctgcgacgtcggtttccgcgaggtgcggattgaaaatggtctgctgctgctgaacggcaagccgttgctgattcgcggcgttaaccgtcacgagcatcatcctctgcatggtcaggtcatggatgagcagacgatggtgcaggatatcctgctgatgaagcagaacaactttaacgccgtgcgctgttcgcattatccgaaccatccgctgtggtacacgctgtgcgaccgctacggcctgtatgtggtggatgaagccaatattgaaacccacggcatggtgccaatgaatcgtctgaccgatgatccgcgctggctacccgcgatgagcgaacgcgtaacgcggatggtgcagcgcgatcgtaatcacccgagtgtgatcatctggtcgctggggaatgaatcaggccacggcgctaatcacgacgcgctgtatcgctggatcaaatctgtcgatccttcccgcccggtacagtatgaaggcggcggagccgacaccacggccaccgatattatttgcccgatgtacgcgcgcgtggatgaagaccagcccttcccggcggtgccgaaatggtccatcaaaaaatggctttcgctgcctggagaaatgcgcccgctgatcctttgcgaatatgcccacgcgatgggtaacagtcttggcggcttcgctaaatactggcaggcgtttcgtcagtacccccgtttacagggcggcttcgtctgggactgggtggatcagtcgctgattaaatatgatgaaaacggcaacccgtggtcggcttacggcggtgattttggcgatacgccgaacgatcgccagttctgtatgaacggtctggtctttgccgaccgcacgccgcatccggcgctgacggaagcaaaacaccaacagcagtatttccagttccgtttatccgggcgaaccatcgaagtgaccagcgaatacctgttccgtcatagcgataacgagttcctgcactggatggtggcactggatggcaagccgctggcaagcggtgaagtgcctctggatgttggcccgcaaggtaagcagttgattgaactgcctgaactgccgcagccggagagcgccggacaactctggctaacggtacgcgtagtgcaaccaaacgcgaccgcatggtcagaagccggacacatcagcgcctggcagcaatggcgtctggcggaaaacctcagcgtgacactcccctccgcgtcccacgccatccctcaactgaccaccagcggaacggatttttgcatcgagctgggtaataagcgttggcaatttaaccgccagtcaggctttctttcacagatgtggattggcgatgaaaaacaactgctgaccccgctgcgcgatcagttcacccgtgcgccgctggataacgacattggcgtaagtgaagcgacccgcattgaccctaacgcctgggtcgaacgctggaaggcggcgggccattaccaggccgaagcggcgttgttgcagtgcacggcagatacacttgccgacgcggtgctgattacaaccgcccacgcgtggcagcatcaggggaaaaccttatttatcagccggaaaacctaccggattgatgggcacggtgagatggtcatcaatgtggatgttgcggtggcaagcgatacaccgcatccggcgcggattggcctgacctgccagctggcgcaggtctcagagcgggtaaactggctcggcctggggccgcaagaaaactatcccgaccgccttactgcagcctgttttgaccgctgggatctgccattgtcagacatgtataccccgtacgtcttcccgagcgaaaacggtctgcgctgcgggacgcgcgaattgaattatggcccacaccagtggcgcggcgacttccagttcaacatcagccgctacagccaacaacaactgatggaaaccagccatcgccatctgctgcacgcggaagaaggcacatggctgaatatcgacggtttccatatggggattggtggcgacgactcctggagcccgtcagtatcggcggaattccagctgagcgccggtcgctaccattaccagttggtctggtgtcaaaaataa

SEQ ID NO: 424 - DNA, 3258 bp, Artificial Sequence
  Description of Artificial Sequence: Synthetic polynucleotide
ggtacccatttcctctcatcccatccggggtgagagtcttttcccccgacttatggctcatgcatgcatcaaaaaagatgtgagcttgatcaaaaacaaaaaatatttcactcgacaggagtatttatattgcgcccgttacgtgggcttcgactgtaaatcagaaaggagaaaacacctatgacgacctacgatcgggatcctctggccgtcgtattacaacgtcgtgactgggaaaaccctggcgttacccaacttaatcgccttgcggcacatccccctttcgccagctggcgtaatagcgaagaggcccgcaccgatcgcccttcccaacagttgcgcagcctgaatggcgaatggcgctttgcctggtttccggcaccagaagcggtgccggaaagctggctggagtgcgatcttcctgacgccgatactgtcgtcgtcccctcaaactggcagatgcacggttacgatgcgcctatctacaccaacgtgacctatcccattacggtcaatccgccgtttgttcccgcggagaatccgacaggttgttactcgctcacatttaatattgatgaaagctggctacaggaaggccagacgcgaattatttttgatggcgttaactcggcgtttcatctgtggtgcaacgggcgctgggtcggttacggccaggacagccgtttgccgtctgaatttgacctgagcgcatttttacgcgccggagaaaaccgcctcgcggtgatggtgctgcgctggagtgacggcagttatctggaagatcaggatatgtggcggatgagcggcattttccgtgacgtctcgttgctgcataaaccgaccacgcaaatcagcgatttccaagttaccactctctttaatgatgatttcagccgcgcggtactggaggcagaagttcagatgtacggcgagctgcgcgatgaactgcgggtgacggtttctttgtggcagggtgaaacgcaggtcgccagcggcaccgcgcctttcggcggtgaaattatcgatgagcgtggcggttatgccgatcgcgtcacactacgcctgaacgttgaaaatccggaactgtggagcgccgaaatcccgaatctctatcgtgcagtggttgaactgcacaccgccgacggcacgctgattgaagcagaagcctgcgacgtcggtttccgcgaggtgcggattgaaaatggtctgctgctgctgaacggcaagccgttgctgattcgcggcgttaaccgtcacgagcatcatcctctgcatggtcaggtcatggatgagcagacgatggtgcaggatatcctgctgatgaagcagaacaactttaacgccgtgcgctgttcgcattatccgaaccatccgctgtggtacacgctgtgcgaccgctacggcctgtatgtggtggatgaagccaatattgaaacccacggcatggtgccaatgaatcgtctgaccgatgatccgcgctggctacccgcgatgagcgaacgcgtaacgcggatggtgcagcgcgatcgtaatcacccgagtgtgatcatctggtcgctggggaatgaatcaggccacggcgctaatcacgacgcgctgtatcgctggatcaaatctgtcgatccttcccgcccggtacagtatgaaggcggcggagccgacaccacggccaccgatattatttgcccgatgtacgcgcgcgtggatgaagaccagcccttcccggcggtgccgaaatggtccatcaaaaaatggctttcgctgcctggagaaatgcgcccgctgatcctttgcgaatatgcccacgcgatgggtaacagtcttggcggcttcgctaaatactggcaggcgtttcgtcagtacccccgtttacagggcggcttcgtctgggactgggtggatcagtcgctgattaaatatgatgaaaacggcaacccgtggtcggcttacggcggtgattttggcgatacgccgaacgatcgccagttctgtatgaacggtctggtctttgccgaccgcacgccgcatccggcgctgacggaagcaaaacaccaacagcagtatttccagttccgtttatccgggcgaaccatcgaagtgaccagcgaatacctgttccgtcatagcgataacgagttcctgcactggatggtggcactggatggcaagccgctggcaagcggtgaagtgcctctggatgttggcccgcaaggtaagcagttgattgaactgcctgaactgccgcagccggagagcgccggacaactctggctaacggtacgcgtagtgcaaccaaacgcgaccgcatggtcagaagccggacacatcagcgcctggcagcaatggcgtctggcggaaaacctcagcgtgacactcccctccgcgtcccacgccatccctcaactgaccaccagcggaacggatttttgcatcgagctgggtaataagcgttggcaatttaaccgccagtcaggctttctttcacagatgtggattggcgatgaaaaacaactgctgaccccgctgcgcgatcagttcacccgtgcgccgctggataacgacattggcgtaagtgaagcgacccgcattgaccctaacgcctgggtcgaacgctggaaggcggcgggccattaccaggccgaagcggcgttgttgcagtgcacggcagatacacttgccgacgcggtgctgattacaaccgcccacgcgtggcagcatcaggggaaaaccttatttatcagccggaaaacctaccggattgatgggcacggtgagatggtcatcaatgtggatgttgcggtggcaagcgatacaccgcatccggcgcggattggcctgacctgccagctggcgcaggtctcagagcgggtaaactggctcggcctggggccgcaagaaaactatcccgaccgccttactgcagcctgttttgaccgctgggatctgccattgtcagacatgtataccccgtacgtcttcccgagcgaaaacggtctgcgctgcgggacgcgcgaattgaattatggcccacaccagtggcgcggcgacttccagttcaacatcagccgctacagccaacaacaactgatggaaaccagccatcgccatctgctgcacgcggaagaaggcacatggctgaatatcgacggtttccatatggggattggtggcgacgactcctggagcccgtcagtatcggcggaattccagctgagcgccggtcgctaccattaccagttggtctggtgtcaaaaataa

SEQ ID NO: 425 - DNA, 3386 bp, Artificial Sequence
  Description of Artificial Sequence: Synthetic polynucleotide
ggtaccgtcagcataacaccctgacctctcattaattgttcatgccgggcggcactatcgtcgtccggccttttcctctcttactctgctacgtacatctatttctataaatccgttcaatttgtctgttttttgcacaaacatgaaatatcagacaattccgtgacttaagaaaatttatacaaatcagcaatataccccttaaggagtatataaaggtgaatttgatttacatcaataagcggggttgctgaatcgttaaggatccctctagaaataattttgtttaactttaagaaggagatatacatatgactatgattacggattctctggccgtcgtattacaacgtcgtgactgggaaaaccctggcgttacccaacttaatcgccttgcggcacatccccctttcgccagctggcgtaatagcgaagaggcccgcaccgatcgcccttcccaacagttgcgcagcctgaatggcgaatggcgctttgcctggtttccggcaccagaagcggtgccggaaagctggctggagtgcgatcttcctgacgccgatactgtcgtcgtcccctcaaactggcagatgcacggttacgatgcgcctatctacaccaacgtgacctatcccattacggtcaatccgccgtttgttcccgcggagaatccgacaggttgttactcgctcacatttaatattgatgaaagctggctacaggaaggccagacgcgaattatttttgatggcgttaactcggcgtttcatctgtggtgcaacgggcgctgggtcggttacggccaggacagccgtttgccgtctgaatttgacctgagcgcatttttacgcgccggagaaaaccgcctcgcggtgatggtgctgcgctggagtgacggcagttatctggaagatcaggatatgtggcggatgagcggcattttccgtgacgtctcgttgctgcataaaccgaccacgcaaatcagcgatttccaagttaccactctctttaatgatgatttcagccgcgcggtactggaggcagaagttcagatgtacggcgagctgcgcgatgaactgcgggtgacggtttctttgtggcagggtgaaacgcaggtcgccagcggcaccgcgcctttcggcggtgaaattatcgatgagcgtggcggttatgccgatcgcgtcacactacgcctgaacgttgaaaatccggaactgtggagcgccgaaatcccgaatctctatcgtgcagtggttgaactgcacaccgccgacggcacgctgattgaagcagaagcctgcgacgtcggtttccgcgaggtgcggattgaaaatggtctgctgctgctgaacggcaagccgttgctgattcgcggcgttaaccgtcacgagcatcatcctctgcatggtcaggtcatggatgagcagacgatggtgcaggatatcctgctgatgaagcagaacaactttaacgccgtgcgctgttcgcattatccgaaccatccgctgtggtacacgctgtgcgaccgctacggcctgtatgtggtggatgaagccaatattgaaacccacggcatggtgccaatgaatcgtctgaccgatgatccgcgctggctacccgcgatgagcgaacgcgtaacgcggatggtgcagcgcgatcgtaatcacccgagtgtgatcatctggtcgctggggaatgaatcaggccacggcgctaatcacgacgcgctgtatcgctggatcaaatctgtcgatccttcccgcccggtacagtatgaaggcggcggagccgacaccacggccaccgatattatttgcccgatgtacgcgcgcgtggatgaagaccagcccttcccggcggtgccgaaatggtccatcaaaaaatggctttcgctgcctggagaaatgcgcccgctgatcctttgcgaatatgcccacgcgatgggtaacagtcttggcggcttcgctaaatactggcaggcgtttcgtcagtacccccgtttacagggcggcttcgtctgggactgggtggatcagtcgctgattaaatatgatgaaaacggcaacccgtggtcggcttacggcggtgattttggcgatacgccgaacgatcgccagttctgtatgaacggtctggtctttgccgaccgcacgccgcatccggcgctgacggaagcaaaacaccaacagcagtatttccagttccgtttatccgggcgaaccatcgaagtgaccagcgaatacctgttccgtcatagcgataacgagttcctgcactggatggtggcactggatggcaagccgctggcaagcggtgaagtgcctctggatgttggcccgcaaggtaagcagttgattgaactgcctgaactgccgcagccggagagcgccggacaactctggctaacggtacgcgtagtgcaaccaaacgcgaccgcatggtcagaagccggacacatcagcgcctggcagcaatggcgtctggcggaaaacctcagcgtgacactcccctccgcgtcccacgccatccctcaactgaccaccagcggaacggatttttgcatcgagctgggtaataagcgttggcaatttaaccgccagtcaggctttctttcacagatgtggattggcgatgaaaaacaactgctgaccccgctgcgcgatcagttcacccgtgcgccgctggataacgacattggcgtaagtgaagcgacccgcattgaccctaacgcctgggtcgaacgctggaaggcggcgggccattaccaggccgaagcggcgttgttgcagtgcacggcagatacacttgccgacgcggtgctgattacaaccgcccacgcgtggcagcatcaggggaaaaccttatttatcagccggaaaacctaccggattgatgggcacggtgagatggtcatcaatgtggatgttgcggtggcaagcgatacaccgcatccggcgcggattggcctgacctgccagctggcgcaggtctcagagcgggtaaactggctcggcctggggccgcaagaaaactatcccgaccgccttactgcagcctgttttgaccgctgggatctgccattgtcagacatgtataccccgtacgtcttcccgagcgaaaacggtctgcgctgcgggacgcgcgaattgaattatggcccacaccagtggcgcggcgacttccagttcaacatcagccgctacagccaacaacaactgatggaaaccagccatcgccatctgctgcacgcggaagaaggcacatggctgaatatcgacggtttccatatggggattggtggcgacgactcctggagcccgtcagtatcggcggaattccagctgagcgccggtcgctaccattaccagttggtctggtgtcaaaaataa

SEQ ID NO: 426 - DNA, 3261 bp, Artificial Sequence
  Description of Artificial Sequence: Synthetic polynucleotide
ggtacccatttcctctcatcccatccggggtgagagtcttttcccccgacttatggctcatgcatgcatcaaaaaagatgtgagcttgatcaaaaacaaaaaatatttcactcgacaggagtatttatattgcgcccggatccctctagaaataattttgtttaactttaagaaggagatatacatatgactatgattacggattctctggccgtcgtattacaacgtcgtgactgggaaaaccctggcgttacccaacttaatcgccttgcggcacatccccctttcgccagctggcgtaatagcgaagaggcccgcaccgatcgcccttcccaacagttgcgcagcctgaatggcgaatggcgctttgcctggtttccggcaccagaagcggtgccggaaagctggctggagtgcgatcttcctgacgccgatactgtcgtcgtcccctcaaactggcagatgcacggttacgatgcgcctatctacaccaacgtgacctatcccattacggtcaatccgccgtttgttcccgcggagaatccgacaggttgttactcgctcacatttaatattgatgaaagctggctacaggaaggccagacgcgaattatttttgatggcgttaactcggcgtttcatctgtggtgcaacgggcgctgggtcggttacggccaggacagccgtttgccgtctgaatttgacctgagcgcatttttacgcgccggagaaaaccgcctcgcggtgatggtgctgcgctggagtgacggcagttatctggaagatcaggatatgtggcggatgagcggcattttccgtgacgtctcgttgctgcataaaccgaccacgcaaatcagcgatttccaagttaccactctctttaatgatgatttcagccgcgcggtactggaggcagaagttcagatgtacggcgagctgcgcgatgaactgcgggtgacggtttctttgtggcagggtgaaacgcaggtcgccagcggcaccgcgcctttcggcggtgaaattatcgatgagcgtggcggttatgccgatcgcgtcacactacgcctgaacgttgaaaatccggaactgtggagcgccgaaatcccgaatctctatcgtgcagtggttgaactgcacaccgccgacggcacgctgattgaagcagaagcctgcgacgtcggtttccgcgaggtgcggattgaaaatggtctgctgctgctgaacggcaagccgttgctgattcgcggcgttaaccgtcacgagcatcatcctctgcatggtcaggtcatggatgagcagacgatggtgcaggatatcctgctgatgaagcagaacaactttaacgccgtgcgctgttcgcattatccgaaccatccgctgtggtacacgctgtgcgaccgctacggcctgtatgtggtggatgaagccaatattgaaacccacggcatggtgccaatgaatcgtctgaccgatgatccgcgctggctacccgcgatgagcgaacgcgtaacgcggatggtgcagcgcgatcgtaatcacccgagtgtgatcatctggtcgctggggaatgaatcaggccacggcgctaatcacgacgcgctgtatcgctggatcaaatctgtcgatccttcccgcccggtacagtatgaaggcggcggagccgacaccacggccaccgatattatttgcccgatgtacgcgcgcgtggatgaagaccagcccttcccggcggtgccgaaatggtccatcaaaaaatggctttcgctgcctggagaaatgcgcccgctgatcctttgcgaatatgcccacgcgatgggtaacagtcttggcggcttcgctaaatactggcaggcgtttcgtcagtacccccgtttacagggcggcttcgtctgggactgggtggatcagtcgctgattaaatatgatgaaaacggcaacccgtggtcggcttacggcggtgattttggcgatacgccgaacgatcgccagttctgtatgaacggtctggtctttgccgaccgcacgccgcatccggcgctgacggaagcaaaacaccaacagcagtatttccagttccgtttatccgggcgaaccatcgaagtgaccagcgaatacctgttccgtcatagcgataacgagttcctgcactggatggtggcactggatggcaagccgctggcaagcggtgaagtgcctctggatgttggcccgcaaggtaagcagttgattgaactgcctgaactgccgcagccggagagcgccggacaactctggctaacggtacgcgtagtgcaaccaaacgcgaccgcatggtcagaagccggacacatcagcgcctggcagcaatggcgtctggcggaaaacctcagcgtgacactcccctccgcgtcccacgccatccctcaactgaccaccagcggaacggatttttgcatcgagctgggtaataagcgttggcaatttaaccgccagtcaggctttctttcacagatgtggattggcgatgaaaaacaactgctgaccccgctgcgcgatcagttcacccgtgcgccgctggataacgacattggcgtaagtgaagcgacccgcattgaccctaacgcctgggtcgaacgctggaaggcggcgggccattaccaggccgaagcggcgttgttgcagtgcacggcagatacacttgccgacgcggtgctgattacaaccgcccacgcgtggcagcatcaggggaaaaccttatttatcagccggaaaacctaccggattgatgggcacggtgagatggtcatcaatgtggatgttgcggtggcaagcgatacaccgcatccggcgcggattggcctgacctgccagctggcgcaggtctcagagcgggtaaactggctcggcctggggccgcaagaaaactatcccgaccgccttactgcagcctgttttgaccgctgggatctgccattgtcagacatgtataccccgtacgtcttcccgagcgaaaacggtctgcgctgcgggacgcgcgaattgaattatggcccacaccagtggcgcggcgacttccagttcaacatcagccgctacagccaacaacaactgatggaaaccagccatcgccatctgctgcacgcggaagaaggcacatggctgaatatcgacggtttccatatggggattggtggcgacgactcctggagcccgtcagtatcggcggaattccagctgagcgccggtcgctaccattaccagttggtctggtgtcaaaaataa

SEQ ID NO: 427 - DNA, 3279 bp, Artificial Sequence
  Description of Artificial Sequence: Synthetic polynucleotide
ggtaccagttgttcttattggtggtgttgctttatggttgcatcgtagtaaatggttgtaacaaaagcaatttttccggctgtctgtatacaaaaacgccgtaaagtttgagcgaagtcaataaactctctacccattcagggcaatatctctcttggatccctctagaaataattttgtttaactttaagaaggagatatacatatgctatgattacggattctctggccgtcgtattacaacgtcgtgactgggaaaaccctggcgttacccaacttaatcgccttgcggcacatccccctttcgccagctggcgtaatagcgaagaggcccgcaccgatcgcccttcccaacagttgcgcagcctgaatggcgaatggcgctttgcctggtttccggcaccagaagcggtgccggaaagctggctggagtgcgatcttcctgacgccgatactgtcgtcgtcccctcaaactggcagatgcacggttacgatgcgcctatctacaccaacgtgacctatcccattacggtcaatccgccgtttgttcccgcggagaatccgacaggttgttactcgctcacatttaatattgatgaaagctggctacaggaaggccagacgcgaattatttttgatggcgttaactcggcgtttcatctgtggtgcaacgggcgctgggtcggttacggccaggacagccgtttgccgtctgaatttgacctgagcgcatttttacgcgccggagaaaaccgcctcgcggtgatggtgctgcgctggagtgacggcagttatctggaagatcaggatatgtggcggatgagcggcattttccgtgacgtctcgttgctgcataaaccgaccacgcaaatcagcgatttccaagttaccactctctttaatgatgatttcagccgcgcggtactggaggcagaagttcagatgtacggcgagctgcgcgatgaactgcgggtgacggtttctttgtggcagggtgaaacgcaggtcgccagcggcaccgcgcctttcggcggtgaaattatcgatgagcgtggcggttatgccgatcgcgtcacactacgcctgaacgttgaaaatccggaactgtggagcgccgaaatcccgaatctctatcgtgcagtggttgaactgcacaccgccgacggcacgctgattgaagcagaagcctgcgacgtcggtttccgcgaggtgcggattgaaaatggtctgctgctgctgaacggcaagccgttgctgattcgcggcgttaaccgtcacgagcatcatcctctgcatggtcaggtcatggatgagcagacgatggtgcaggatatcctgctgatgaagcagaacaactttaacgccgtgcgctgttcgcattatccgaaccatccgctgtggtacacgctgtgcgaccgctacggcctgtatgtggtggatgaagccaatattgaaacccacggcatggtgccaatgaatcgtctgaccgatgatccgcgctggctacccgcgatgagcgaacgcgtaacgcggatggtgcagcgcgatcgtaatcacccgagtgtgatcatctggtcgctggggaatgaatcaggccacggcgctaatcacgacgcgctgtatcgctggatcaaatctgtcgatccttcccgcccggtacagtatgaaggcggcggagccgacaccacggccaccgatattatttgcccgatgtacgcgcgcgtggatgaagaccagcccttcccggcggtgccgaaatggtccatcaaaaaatggctttcgctgcctggagaaatgcgcccgctgatcctttgcgaatatgcccacgcgatgggtaacagtcttggcggcttcgctaaatactggcaggcgtttcgtcagtacccccgtttacagggcggcttcgtctgggactgggtggatcagtcgctgattaaatatgatgaaaacggcaacccgtggtcggcttacggcggtgattttggcgatacgccgaacgatcgccagttctgtatgaacggtctggtctttgccgaccgcacgccgcatccggcgctgacggaagcaaaacaccaacagcagtatttccagttccgtttatccgggcgaaccatcgaagtgaccagcgaatacctgttccgtcatagcgataacgagttcctgcactggatggtggcactggatggcaagccgctggcaagcggtgaagtgcctctggatgttggcccgcaaggtaagcagttgattgaactgcctgaactgccgcagccggagagcgccggacaactctggctaacggtacgcgtagtgcaaccaaacgcgaccgcatggtcagaagccggacacatcagcgcctggcagcaatggcgtctggcggaaaacctcagcgtgacactcccctccgcgtcccacgccatccctcaactgaccaccagcggaacggatttttgcatcgagctgggtaataagcgttggcaatttaaccgccagtcaggctttctttcacagatgtggattggcgatgaaaaacaactgctgaccccgctgcgcgatcagttcacccgtgcgccgctggataacgacattggcgtaagtgaagcgacccgcattgaccctaacgcctgggtcgaacgctggaaggcggcgggccattaccaggccgaagcggcgttgttgcagtgcacggcagatacacttgccgacgcggtgctgattacaaccgcccacgcgtggcagcatcaggggaaaaccttatttatcagccggaaaacctaccggattgatgggcacggtgagatggtcatcaatgtggatgttgcggtggcaagcgatacaccgcatccggcgcggattggcctgacctgccagctggcgcaggtctcagagcgggtaaactggctcggcctggggccgcaagaaaactatcccgaccgccttactgcagcctgttttgaccgctgggatctgccattgtcagacatgtataccccgtacgtcttcccgagcgaaaacggtctgcgctgcgggacgcgcgaattgaattatggcccacaccagtggcgcggcgacttccagttcaacatcagccgctacagccaacaacaactgatggaaaccagccatcgccatctgctgcacgcggaagaaggcacatggctgaatatcgacggtttccatatggggattggtggcgacgactcctggagcccgtcagtatcggcggaattccagctgagcgccggtcgctaccattaccagttggtctggtgtcaaaaataa

SEQ ID NO: 428 - DNA, 1420 bp, Artificial Sequence
  Description of Artificial Sequence: Synthetic polynucleotide
ttattatcgcaccgcaatcgggattttcgattcataaagcaggtcgtaggtcggcttgttgagcaggtcttgcagcgtgaaaccgtccagatacgtgaaaaacgacttcattgcaccgccgagtatgcccgtcagccggcaggacggcgtaatcaggcattcgttgttcgggcccatacactcgaccagctgcatcggttcgaggtggcggacgaccgcgccgatattgatgcgttcgggcggcgcggccagcctcagcccgccgcctttcccgcgtacgctgtgcaagaacccgcctttgaccagcgcggtaaccactttcatcaaatggcttttggaaatgccgtaggtcgaggcgatggtggcgatattgaccagcgcgtcgtcgttgacggcggtgtagatgaggacgcgcagcccgtagtcggtatgttgggtcagatacatacaacctccttagtacatgcaaaattatttctagagcaacatacgagccggaagcataaagtgtaaagcctggggtgcctaatgagttgagttgaggaattataacaggaagaaatattcctcatacgcttgtaattcctctatggttgttgacaattaatcatcggctcgtataatgtataacattcatattttgtgaattttaaactctagaaataattttgtttaactttaagaaggagatatacatatggctagcaaaggcgaagaattgttcacgggcgttgttcctattttggttgaattggatggcgatgttaatggccataaattcagcgttagcggcgaaggcgaaggcgatgctacgtatggcaaattgacgttgaaattcatttgtacgacgggcaaattgcctgttccttggcctacgttggttacgacgttcagctatggcgttcaatgtttcagccgttatcctgatcatatgaaacgtcatgatttcttcaaaagcgctatgcctgaaggctatgttcaagaacgtacgattagcttcaaagatgatggcaattataaaacgcgtgctgaagttaaattcgaaggcgatacgttggttaatcgtattgaattgaaaggcattgatttcaaagaagatggcaatattttgggccataaattggaatataattataatagccataatgtttatattacggctgataaacaaaaaaatggcattaaagctaatttcaaaattcgtcataatattgaagatggcagcgttcaattggctgatcattatcaacaaaatacgcctattggcgatggccctgttttgttgcctgataatcattatttgagcacgcaaagcgctttgagcaaagatcctaatgaaaaacgtgatcatatggttttgttggaattcgttacggctgctggcattacgcatggcatggatgaattgtataaataataa

SEQ ID NO: 429 - DNA, 60 bp, Artificial Sequence
  Description of Artificial Sequence: Synthetic primer
tagaactgatgcaaaaagtgctcgacgaaggcacacagatgtgtaggctggagctgcttc

SEQ ID NO: 430 - DNA, 60 bp, Artificial Sequence
  Description of Artificial Sequence: Synthetic primer
gtttcgtaattagatagccaccggcgctttaatgcccggacatatgaatatcctccttag

SEQ ID NO: 431 - DNA, 52 bp, Artificial Sequence
  Description of Artificial Sequence: Synthetic primer
caacacgtttcctgaggaaccatgaaacagtatttagaactgatgcaaaaag

SEQ ID NO: 432 - DNA, 46 bp, Artificial Sequence
  Description of Artificial Sequence: Synthetic primer
cgcacactggcgtcggctctggcaggatgtttcgtaattagatagc

SEQ ID NO: 433 - DNA, 36 bp, Artificial Sequence
  Description of Artificial Sequence: Synthetic primer
atatcgtcgcagcccacagcaacacgtttcctgagg

SEQ ID NO: 434 - DNA, 47 bp, Artificial Sequence
  Description of Artificial Sequence: Synthetic primer
aagaatttaacggagggcaaaaaaaaccgacgcacactggcgtcggc

SEQ ID NO: 435-473 - skipped (39 entries)

SEQ ID NO: 474 - DNA, 2555 bp, Artificial Sequence
  Description of Artificial Sequence: Synthetic polynucleotide
actcttcctttttcaatattattgaagcatttatcagggttattgtctcatgagcggatacatatttgaatgtatttagaaaaataaacaaataggggaattaaaaaaaagcccgctcattaggcgggctactacctaggccgcggccgcgcgaattcgagctcggtacccggggatcctctagagtcgacctgcaggcatgcaagcttgcggccgcgtcgtgactgggaaaaccctggcgactagtcttggactcctgttgatagatccagtaatgacctcagaactccatctggatttgttcagaacgctcggttgccgccgggcgttttttattggtgagaatccaggggtccccaataattacgatttaaatcacagcaaacaccacgtcggccctatcagctgcgtgctttctatgagtcgttgctgcataacttgacaattaacatccggctcgtagggtttgtggagggcccaagttcacttaaaaaggagatcaacaatgaaagcaattttcgtactgaaacatcttaatcatgctggggagggtttctaatgttcacgggaagtattgtcgcgattgttactccgatggatgaaaaaggtaatgtctgtcgggctagcttgaaaaaactgattgattatcatgtcgccagcggtacttcggcgatcgtttctgttggcaccactggcgagtccgctaccttaaatcatgacgaacatgctgatgtggtgatgatgacgctggatctggctgatgggcgcattccggtaattgccgggaccggcgctaacgctactgcggaagccattagcctgacgcagcgcttcaatgacagtggtatcgtcggctgcctgacggtaaccccttactacaatcgtccgtcgcaagaaggtttgtatcagcatttcaaagccatcgctgagcatactgacctgccgcaaattctgtataatgtgccgtcccgtactggctgcgatctgctcccggaaacggtgggccgtctggcgaaagtaaaaaatattatcggaatcaaagaggcaacagggaacttaacgcgtgtaaaccagatcaaagagctggtttcagatgattttgttctgctgagcggcgatgatgcgagcgcgctggacttcatgcaattgggcggtcatggggttatttccgttacggctaacgtcgcagcgcgtgatatggcccagatgtgcaaactggcagcagaagggcattttgccgaggcacgcgttattaatcagcgtctgatgccattacacaacaaactatttgtcgaacccaatccaatcccggtgaaatgggcatgtaaggaactgggtcttgtggcgaccgatacgctgcgcctgccaatgacaccaatcaccgacagtggccgtgagacggtcagagcggcgcttaaacatgccggtttgctgtaagacttttgtcaggttcctactgtgacgactaccaccgatagactggagtgttgctgcgaaaaaaccccgccgaagcggggttttttgcgagaagtcaccacgattgtgctttacacggagtagtcggcagttccttaagtcagaatagtggacaggcggccaagaacttcgttcatgatagtctccggaacccgttcgagtcgttttccgccccgtgctttcatatcaattgtccggggttgatcgcaacgtacaacacctgtggtacgtatgccaacaccatccaacgacaccgcaaagccggcagtgcgggcaaaattgcctccgctggttacgggcacaacaacaggcaggcgggtcacgcgattaaaggccgccggtgtgacaatcagcaccggccgcgttccctgctgctcatgacctgcggtaggatcaagcgagacaagccagatttcccctctttccatctagtataactattgtttctctagtaacatttattgtacaacacgagcccatttttgtcaaataaattttaaattatatcaacgttaataagacgttgtcaataaaattattttgacaaaattggccggccggcgcgccgatctgaagatcagcagttcaacctgttgatagtacgtactaagctctcatgtttcacgtactaagctctcatgtttaacgtactaagctctcatgtttaacgaactaaaccctcatggctaacgtactaagctctcatggctaacgtactaagctctcatgtttcacgtactaagctctcatgtttgaacaataaaattaatataaatcagcaacttaaatagcctctaaggttttaagttttataagaaaaaaaagaatatataaggcttttaaagcctttaaggtttaacggttgtggacaacaagccagggatgtaacgcactgagaagcccttagagcctctcaaagcaattttgagtgacacaggaacacttaacggctgacatggggcgcgcccagctgtctagggcggcggatttgtcctactcaggagagcgttcaccgacaaacaacagataaaacgaaaggcccagtctttcgactgagcctttcgttttatttgatgcct

SEQ ID NO: 475 - DNA, 2472 bp, Artificial Sequence
  Description of Artificial Sequence: Synthetic polynucleotide
actcttcctttttcaatattattgaagcatttatcagggttattgtctcatgagcggatacatatttgaatgtatttagaaaaataaacaaataggggaattaaaaaaaagcccgctcattaggcgggctactacctaggccgcggccgcgcgaattcgagctcggtacccggggatcctctagagtcgacctgcaggcatgcaagcttgcggccgcgtcgtgactgggaaaaccctggcgactagtcttggactcctgttgatagatccagtaatgacctcagaactccatctggatttgttcagaacgctcggttgccgccgggcgttttttattggtgagaatccaggggtccccaataattacgatttaaatcacagcaaacaccacgtcggccctatcagctgcgtgctttctatgagtcgttgctgcataacttgacaattaatcatccggctcgtagggtttgtggagggcccaagttcacttaaaaaggagatcaacaatgaaagcaattttcgtactgaaacatcttaatcatgctggggagggtttctaatgaaacagtatttagaactgatgcaaaaagtgctcgacgaaggcacacagaaaaacgaccgtaccggaaccggaacgctttccatttttggtcatcagatgcgttttaacctgcaagatggattcccgctggtgacaactaaacgttgccacctgcgttccatcatccatgaactgctgtggtttcttcagggcgacactaacattgcttatctacacgaaaacaatgtcaccatctgggacgaatgggccgatgaaaacggcgacctcgggccagtgtatggtaaacagtggcgtgcctggccaacgccagatggtcgtcatattgaccagatcactacggtactgaaccagctgaaaaacgacccggattcgcgccgcattattgtttcagcgtggaacgtaggcgaactggataaaatggcgctggcaccgtgccatgcattcttccagttctatgtggcagacggcaaactctcttgccagctttatcagcgctcctgtgacgtcttcctcggcctgccgttcaacattgccagctacgcgttattggtgcatatgatggcgcagcagtgcgatctggaagtgggtgattttgtctggaccggtggcgacacgcatctgtacagcaaccatatggatcaaactcatctgcaattaagccgcgaaccgcgtccgctgccgaagttgattatcaaacgtaaacccgaatccatcttcgactaccgtttcgaagactttgagattgaaggctacgatccgcatccgggcattaaagcgccggtggctatctaagacttttgtcaggttcctactgtgacgactaccaccgatagactggagtgttgctgcgaaaaaaccccgccgaagcggggttttttgcgagaagtcaccacgattgtgctttacacggagtagtcggcagttccttaagtcagaatagtggacaggcggccaagaacttcgttcatgatagtctccggaacccgttcgagtcgttttccgccccgtgctttcatatcaattgtccggggttgatcgcaacgtacaacacctgtggtacgtatgccaacaccatccaacgacaccgcaaagccggcagtgcgggcaaaattgcctccgctggttacgggcacaacaacaggcaggcgggtcacgcgattaaaggccgccggtgtgacaatcagcaccggccgcgttccctgctgctcatgacctgcggtaggatcaagcgagacaagccagatttcccctctttccatctagtataactattgtttctctagtaacatttattgtacaacacgagcccatttttgtcaaataaattttaaattatatcaacgttaataagacgttgtcaataaaattattttgacaaaattggccggccggcgcgccgatctgaagatcagcagttcaacctgttgatagtacgtactaagctctcatgtttcacgtactaagctctcatgtttaacgtactaagctctcatgtttaacgaactaaaccctcatggctaacgtactaagctctcatggctaacgtactaagctctcatgtttcacgtactaagctctcatgtttgaacaataaaattaatataaatcagcaacttaaatagcctctaaggttttaagttttataagaaaaaaaagaatatataaggcttttaaagcctttaaggtttaacggttgtggacaacaagccagggatgtaacgcactgagaagcccttagagcctctcaaagcaattttgagtgacacaggaacacttaacggctgacatggggcgcgcccagctgtctagggcggcggatttgtcctactcaggagagcgttcaccgacaaacaacagataaaacgaaaggcccagtctttcgactgagcctttcgttttatttgatgcct

SEQ ID NO: 476 - DNA, 333 bp, Artificial Sequence
  Description of Artificial Sequence: Synthetic polynucleotide
ttaagtcagaatagtggacaggcggccaagaacttcgttcatgatagtctccggaacccgttcgagtcgttttccgccccgtgctttcatatcaattgtccggggttgatcgcaacgtacaacacctgtggtacgtatgccaacaccatccaacgacaccgcaaagccggcagtgcgggcaaaattgcctccgctggttacgggcacaacaacaggcaggcgggtcacgcgattaaaggccgccggtgtgacaatcagcaccggccgcgttccctgctgctcatgacctgcggtaggatcaagcgagacaagccagatttcccctctttccat

SEQ ID NO: 477 - DNA, 879 bp, Artificial Sequence
  Description of Artificial Sequence: Synthetic polynucleotide
atgttcacgggaagtattgtcgcgattgttactccgatggatgaaaaaggtaatgtctgtcgggctagcttgaaaaaactgattgattatcatgtcgccagcggtacttcggcgatcgtttctgttggcaccactggcgagtccgctaccttaaatcatgacgaacatgctgatgtggtgatgatgacgctggatctggctgatgggcgcattccggtaattgccgggaccggcgctaacgctactgcggaagccattagcctgacgcagcgcttcaatgacagtggtatcgtcggctgcctgacggtaaccccttactacaatcgtccgtcgcaagaaggtttgtatcagcatttcaaagccatcgctgagcatactgacctgccgcaaattctgtataatgtgccgtcccgtactggctgcgatctgctcccggaaacggtgggccgtctggcgaaagtaaaaaatattatcggaatcaaagaggcaacagggaacttaacgcgtgtaaaccagatcaaagagctggtttcagatgattttgttctgctgagcggcgatgatgcgagcgcgctggacttcatgcaattgggcggtcatggggttatttccgttacggctaacgtcgcagcgcgtgatatggcccagatgtgcaaactggcagcagaagggcattttgccgaggcacgcgttattaatcagcgtctgatgccattacacaacaaactatttgtcgaacccaatccaatcccggtgaaatgggcatgtaaggaactgggtcttgtggcgaccgatacgctgcgcctgccaatgacaccaatcaccgacagtggccgtgagacggtcagagcggcgcttaaacatgccggtttgctgtaa

SEQ ID NO: 478 - DNA, 795 bp, Artificial Sequence
  Description of Artificial Sequence: Synthetic polynucleotide
atgaaacagtatttagaactgatgcaaaaagtgctcgacgaaggcacacagaaaaacgaccgtaccggaaccggaacgctttccatttttggtcatcagatgcgttttaacctgcaagatggattcccgctggtgacaactaaacgttgccacctgcgttccatcatccatgaactgctgtggtttcttcagggcgacactaacattgcttatctacacgaaaacaatgtcaccatctgggacgaatgggccgatgaaaacggcgacctcgggccagtgtatggtaaacagtggcgtgcctggccaacgccagatggtcgtcatattgaccagatcactacggtactgaaccagctgaaaaacgacccggattcgcgccgcattattgtttcagcgtggaacgtaggcgaactggataaaatggcgctggcaccgtgccatgcattcttccagttctatgtggcagacggcaaactctcttgccagctttatcagcgctcctgtgacgtcttcctcggcctgccgttcaacattgccagctacgcgttattggtgcatatgatggcgcagcagtgcgatctggaagtgggtgattttgtctggaccggtggcgacacgcatctgtacagcaaccatatggatcaaactcatctgcaattaagccgcgaaccgcgtccgctgccgaagttgattatcaaacgtaaacccgaatccatcttcgactaccgtttcgaagactttgagattgaaggctacgatccgcatccgggcattaaagcgccggtggctatctaa

SEQ ID NO: 479 - protein, 110 aa, Artificial Sequence
  Description of Artificial Sequence: Synthetic polypeptide
MERGEIWLVSLDPTAGHEQQGTRPVLIVTPAAFNRVTRLPVVVPVTSGGNFARTAGFAVSLDGVGIRTTGVVRCDQPRTIDMKARGGKRLERVPETIMNEVLGRLSTILT

SEQ ID NO: 480 - protein, 292 aa, Artificial Sequence
  Description of Artificial Sequence: Synthetic polypeptide
MFTGSIVAIVTPMDEKGNVCRASLKKLIDYHVASGTSAIVSVGTTGESATLNHDEHADVVMMTLDLADGRIPVIAGTGANATAEAISLTQRFNDSGIVGCLTVTPYYNRPSQEGLYQHFKAIAEHTDLPQILYNVPSRTGCDLLPETVGRLAKVKNIIGIKEATGNLTRVNQIKELVSDDFVLLSGDDASALDFMQLGGHGVISVTANVAARDMAQMCKLAAEGHFAEARVINQRLMPLHNKLFVEPNPIPVKWACKELGLVATDTLRLPMTPITDSGRETVRAALKHAGLL

SEQ ID NO: 481 - protein, 264 aa, Artificial Sequence
  Description of Artificial Sequence: Synthetic polypeptide
MKQYLELMQKVLDEGTQKNDRTGTGTLSIFGHQMRFNLQDGFPLVTTKRCHLRSIIHELLWFLQGDTNIAYLHENNVTIWDEWADENGDLGPVYGKQWRAWPTPDGRHIDQITTVLNQLKNDPDSRRIIVSAWNVGELDKMALAPCHAFFQFYVADGKLSCQLYQRSCDVFLGLPFNIASYALLVHMMAQQCDLEVGDFVWTGGDTHLYSNHMDQTHLQLSREPRPLPKLIIKRKPESIFDYRFEDFEIEGYDPHPGIKAPVAI

SEQ ID NO: 482 - DNA, 1490 bp, Artificial Sequence
  Description of Artificial Sequence: Synthetic polynucleotide
ttgacggctagctcagtcctaggtacagtgctagcggatctgctggaacaggtggtgagactcaaggtcatgatggacgtgaacaaaaaaacgaaaattcgccaccgaaacgagctaaatcacaccctggctcaacttcctttgcccgcaaagcgagtgatgtatatggcgcttgctcccattgatagcaaagaacctcttgaacgagggcgagttttcaaaattagggctgaagaccttgcagcgctcgccaaaatcaccccatcgcttgcttatcgacaattaaaagagggtggtaaattacttggtgccagcaaaatttcgctaagaggggatgatatcattgctttagctaaagagcttaacctgctctttactgctaaaaactcccctgaagagttagaccttaacattattgagtggatagcttattcaaatgatgaaggatacttgtctttaaaattcaccagaaccatagaaccatatatctctagccttattgggaaaaaaaataaattcacaacgcaattgttaacggcaagcttacgcttaagtagccagtattcatcttctctttatcaacttatcaggaagcattactctaattttaagaagaaaaattattttattatttccgttgatgagttaaaggaagagttaatagcttatacttttgataaagatggaaatattgagtacaaataccctgactttcctatttttaaaagggatgtgttaaataaagccattgctgaaattaaaaagaaaacagaaatatcgtttgttggcttcactgttcatgaaaaagaaggaagaaaaattagtaagctgaagttcgaatttgtcgttgatgaagatgaattttctggcgataaagatgatgaagctttttttatgaatttatctgaagctgatgcagcttttctcaaggtatttgatgaaaccgtacctcccaaaaaagctaaggggtgaggatctccaggcatcaaataaaacgaaaggctcagtcgaaagactgggcctttcgttttatctgttgtttgtcggtgaacgctctctactagagtcacactggctcaccttcgggtgggcctttctgcgtttatacccgggaaaaagagtattgacttaaagtctaacctataggtataatgtgtggagaccagaggtaaggaggtaacaaccatgcgagtgttgaagaaacatcttaatcatgctaaggaggttttctaatgcataccacccgactgaagagggttggcggctcagttatgctgaccgtcccaccggcactgctgaatgcgctgtctctgggcacagataatgaagttggcatggtcattgataatggccggctgattgttgagccgtacagacgcccgcaatattcactggctgagctactggcacagtgtgatccgaatgctgaaatatcagctgaagaacgagaatggctggatgcaccggcgactggtcaggaggaaatctga

SEQ ID NO: 483 - DNA, 1490 bp, Artificial Sequence
  Description of Artificial Sequence: Synthetic polynucleotide
ttgacggctagctcagtcctaggtacagtgctagcggatcttccggaagactaggtgagactcaaggtcatgatggacgtgaacaaaaaaacgaaaattcgccaccgaaacgagctaaatcacaccctggctcaacttcctttgcccgcaaagcgagtgatgtatatggcgcttgctcccattgatagcaaagaacctcttgaacgagggcgagttttcaaaattagggctgaagaccttgcagcgctcgccaaaatcaccccatcgcttgcttatcgacaattaaaagagggtggtaaattacttggtgccagcaaaatttcgctaagaggggatgatatcattgctttagctaaagagcttaacctgctctttactgctaaaaactcccctgaagagttagaccttaacattattgagtggatagcttattcaaatgatgaaggatacttgtctttaaaattcaccagaaccatagaaccatatatctctagccttattgggaaaaaaaataaattcacaacgcaattgttaacggcaagcttacgcttaagtagccagtattcatcttctctttatcaacttatcaggaagcattactctaattttaagaagaaaaattattttattatttccgttgatgagttaaaggaagagttaatagcttatacttttgataaagatggaaatattgagtacaaataccctgactttcctatttttaaaagggatgtgttaaataaagccattgctgaaattaaaaagaaaacagaaatatcgtttgttggcttcactgttcatgaaaaagaaggaagaaaaattagtaagctgaagttcgaatttgtcgttgatgaagatgaattttctggcgataaagatgatgaagctttttttatgaatttatctgaagctgatgcagcttttctcaaggtatttgatgaaaccgtacctcccaaaaaagctaaggggtgaggatctccaggcatcaaataaaacgaaaggctcagtcgaaagactgggcctttcgttttatctgttgtttgtcggtgaacgctctctactagagtcacactggctcaccttcgggtgggcctttctgcgtttatacccgggaaaaagagtattgacttaaagtctaacctataggtataatgtgtggagaccagaggtaaggaggtaacaaccatgcgagtgttgaagaaacatcttaatcatgctaaggaggttttctaatgcataccacccgactgaagagggttggcggctcagttatgctgaccgtcccaccggcactgctgaatgcgctgtctctgggcacagataatgaagttggcatggtcattgataatggccggctgattgttgagccgtacagacgcccgcaatattcactggctgagctactggcacagtgtgatccgaatgctgaaatatcagctgaagaacgagaatggctggatgcaccggcgactggtcaggaggaaatctga

SEQ ID NO: 484 - DNA, 917 bp, Artificial Sequence
  Description of Artificial Sequence: Synthetic polynucleotide
tgagactcaaggtcatgatggacgtgaacaaaaaaacgaaaattcgccaccgaaacgagctaaatcacaccctggctcaacttcctttgcccgcaaagcgagtgatgtatatggcgcttgctcccattgatagcaaagaacctcttgaacgagggcgagttttcaaaattagggctgaagaccttgcagcgctcgccaaaatcaccccatcgcttgcttatcgacaattaaaagagggtggtaaattacttggtgccagcaaaatttcgctaagaggggatgatatcattgctttagctaaagagcttaacctgctctttactgctaaaaactcccctgaagagttagaccttaacattattgagtggatagcttattcaaatgatgaaggatacttgtctttaaaattcaccagaaccatagaaccatatatctctagccttattgggaaaaaaaataaattcacaacgcaattgttaacggcaagcttacgcttaagtagccagtattcatcttctctttatcaacttatcaggaagcattactctaattttaagaagaaaaattattttattatttccgttgatgagttaaaggaagagttaatagcttatacttttgataaagatggaaatattgagtacaaataccctgactttcctatttttaaaagggatgtgttaaataaagccattgctgaaattaaaaagaaaacagaaatatcgtttgttggcttcactgttcatgaaaaagaaggaagaaaaattagtaagctgaagttcgaatttgtcgttgatgaagatgaattttctggcgataaagatgatgaagctttttttatgaatttatctgaagctgatgcagcttttctcaaggtatttgatgaaaccgtacctcccaaaaaagctaaggggtga

SEQ ID NO: 485 - DNA, 255 bp, Artificial Sequence
  Description of Artificial Sequence: Synthetic polynucleotide
cataccacccgactgaagagggttggcggctcagttatgctgaccgtcccaccggcactgctgaatgcgctgtctctgggcacagataatgaagttggcatggtcattgataatggccggctgattgttgagccgtacagacgcccgcaatattcactggctgagctactggcacagtgtgatccgaatgctgaaatatcagctgaagaacgagaatggctggatgcaccggcgactggtcaggaggaaatctga

SEQ ID NO: 486 - DNA, 14 bp, Artificial Sequence
  Description of Artificial Sequence: Synthetic oligonucleotide
gctggaacaggtgg

SEQ ID NO: 487 - DNA, 14 bp, Artificial Sequence
  Description of Artificial Sequence: Synthetic oligonucleotide
tccggaagactagg

SEQ ID NO: 488 - DNA, 1082 bp, Artificial Sequence
  Description of Artificial Sequence: Synthetic polynucleotide
atggggtacaaaatgaacattagctcgcttcgcaaagcattcatttttatgggggctgttgcagctttaagccttgtcaatgcccagtcagcgcttgccagccccggacaaggcacccaatcagagaatagctgtacacatttccctggtaatcttcctaatatgctgcgtgacctgcgcgatgcgttcagtcgcgttaaaactttttttcaaatgaaagaccagttggataaccttttattaaaagaatcactgttagaggattttaaggggtatctgggatgccaggccctgtccgagatgattcaattttacctggaagaggtaatgccccaagctgagaaccaggacccggacatcaaggcgcacgttaactctttaggggagaatctgaaaaccttacgtctgcgtcttcgtcgctgccatcgcttccttccgtgcgaaaataaatcgaaagccgtggagcaagtcaaaaacgctttcaataagctgcaggagaagggaatttataaggctatgagtgagttcgatattttcattaactacattgaggcttatatgacaatgaagattcgcaatggtggtggttcgggcggtgggtcaccaggtcagggtacgcaatccgaaaactcatgcactcatttcccaggtaacctgccgaacatgctgcgcgacctgcgcgatgcgttttcgcgtgtaaagactttcttccaaatgaaagatcaattagataacctgcttttaaaagagtcgctgcttgaagacttcaaaggctacttaggctgtcaagcccttagtgagatgatccaattttatcttgaggaagtcatgccgcaagcagaaaatcaggacccggatatcaaggcgcacgttaacagccttggtgagaatctgaaaacattacgcttgcgtttacgtcgctgccaccgttttctgccatgcgaaaacaagtcgaaagcagtcgagcaagtaaagaatgcctttaacaagctgcaggagaagggcatttataaagcgatgtcggagttcgatatctttatcaactacattgaagcatacatgacgatgaagatccgcaactg

SEQ ID NO: 489 - DNA, 1046 bp, Artificial Sequence
  Description of Artificial Sequence: Synthetic polynucleotide
atgaaacaatcgaccatcgcattggcgctgcttcctctattgttcacaccggtgacaaaggcaagccccggacaaggcacccaatcagagaatagctgtacacatttccctggtaatcttcctaatatgctgcgtgacctgcgcgatgcgttcagtcgcgttaaaactttttttcaaatgaaagaccagttggataaccttttattaaaagaatcactgttagaggattttaaggggtatctgggatgccaggccctgtccgagatgattcaattttacctggaagaggtaatgccccaagctgagaaccaggacccggacatcaaggcgcacgttaactctttaggggagaatctgaaaaccttacgtctgcgtcttcgtcgctgccatcgcttccttccgtgcgaaaataaatcgaaagccgtggagcaagtcaaaaacgctttcaataagctgcaggagaagggaatttataaggctatgagtgagttcgatattttcattaactacattgaggcttatatgacaatgaagattcgcaatggtggtggttcgggcggtgggtcaccaggtcagggtacgcaatccgaaaactcatgcactcatttcccaggtaacctgccgaacatgctgcgcgacctgcgcgatgcgttttcgcgtgtaaagactttcttccaaatgaaagatcaattagataacctgcttttaaaagagtcgctgcttgaagacttcaaaggctacttaggctgtcaagcccttagtgagatgatccaattttatcttgaggaagtcatgccgcaagcagaaaatcaggacccggatatcaaggcgcacgttaacagccttggtgagaatctgaaaacattacgcttgcgtttacgtcgctgccaccgttttctgccatgcgaaaacaagtcgaaagcagtcgagcaagtaaagaatgcctttaacaagctgcaggagaagggcatttataaagcgatgtcggagttcgatatctttatcaactacattgaagcatacatgacgatgaagatccgcaactg

SEQ ID NO: 490 - DNA, 60 bp, Artificial Sequence
  Description of Artificial Sequence: Synthetic oligonucleotide
aaacaatcgaccatcgcattggcgctgcttcctctattgttcacaccggtgacaaaggca

SEQ ID NO: 491 - DNA, 99 bp, Artificial Sequence
  Description of Artificial Sequence: Synthetic oligonucleotide
atggggtacaaaatgaacattagctcgcttcgcaaagcattcatttttatgggggctgttgcagctttaagccttgtcaatgcccagtcagcgcttgcc

SEQ ID NO: 492 - DNA, 981 bp, Artificial Sequence
  Description of Artificial Sequence: Synthetic polynucleotide
agccccggacaaggcacccaatcagagaatagctgtacacatttccctggtaatcttcctaatatgctgcgtgacctgcgcgatgcgttcagtcgcgttaaaactttttttcaaatgaaagaccagttggataaccttttattaaaagaatcactgttagaggattttaaggggtatctgggatgccaggccctgtccgagatgattcaattttacctggaagaggtaatgccccaagctgagaaccaggacccggacatcaaggcgcacgttaactctttaggggagaatctgaaaaccttacgtctgcgtcttcgtcgctgccatcgcttccttccgtgcgaaaataaatcgaaagccgtggagcaagtcaaaaacgctttcaataagctgcaggagaagggaatttataaggctatgagtgagttcgatattttcattaactacattgaggcttatatgacaatgaagattcgcaatggtggtggttcgggcggtgggtcaccaggtcagggtacgcaatccgaaaactcatgcactcatttcccaggtaacctgccgaacatgctgcgcgacctgcgcgatgcgttttcgcgtgtaaagactttcttccaaatgaaagatcaattagataacctgcttttaaaagagtcgctgcttgaagacttcaaaggctacttaggctgtcaagcccttagtgagatgatccaattttatcttgaggaagtcatgccgcaagcagaaaatcaggacccggatatcaaggcgcacgttaacagccttggtgagaatctgaaaacattacgcttgcgtttacgtcgctgccaccgttttctgccatgcgaaaacaagtcgaaagcagtcgagcaagtaaagaatgcctttaacaagctgcaggagaagggcatttataaagcgatgtcggagttcgatatctttatcaactacattgaagcatacatgacgatgaagatccgcaac

SEQ ID NO: 493 - DNA, 480 bp, Homo sapiens
tcaccaggtcagggtacgcaatccgaaaactcatgcactcatttcccaggtaacctgccgaacatgctgcgcgacctgcgcgatgcgttttcgcgtgtaaagactttcttccaaatgaaagatcaattagataacctgcttttaaaagagtcgctgcttgaagacttcaaaggctacttaggctgtcaagcccttagtgagatgatccaattttatcttgaggaagtcatgccgcaagcagaaaatcaggacccggatatcaaggcgcacgttaacagccttggtgagaatctgaaaacattacgcttgcgtttacgtcgctgccaccgttttctgccatgcgaaaacaagtcgaaagcagtcgagcaagtaaagaatgcctttaacaagctgcaggagaagggcatttataaagcgatgtcggagttcgatatctttatcaactacattgaagcatacatgacgatgaagatccgcaac

SEQ ID NO: 494 - DNA, 21 bp, Artificial Sequence
  Description of Artificial Sequence: Synthetic oligonucleotide
ggtggtggttcgggcggtggg

SEQ ID NO: 495 - protein, 360 aa, Artificial Sequence
  Description of Artificial Sequence: Synthetic polypeptide
MGYKMNISSLRKAFIFMGAVAALSLVNAQSALASPGQGTQSENSCTHFPGNLPNMLRDLRDAFSRVKTFFQMKDQLDNLLLKESLLEDFKGYLGCQALSEMIQFYLEEVMPQAENQDPDIKAHVNSLGENLKTLRLRLRRCHRFLPCENKSKAVEQVKNAFNKLQEKGIYKAMSEFDIFINYIEAYMTMKIRNGGGSGGGSPGQGTQSENSCTHFPGNLPNMLRDLRDAFSRVKTFFQMKDQLDNLLLKESLLEDFKGYLGCQALSEMIQFYLEEVMPQAENQDPDIKAHVNSLGENLKTLRLRLRRCHRFLPCENKSKAVEQVKNAFNKLQEKGIYKAMSEFDIFINYIEAYMTMKIRN

SEQ ID NO: 496 - protein, 348 aa, Artificial Sequence
  Description of Artificial Sequence: Synthetic polypeptide
MKQSTIALALLPLLFTPVTKASPGQGTQSENSCTHFPGNLPNMLRDLRDAFSRVKTFFQMKDQLDNLLLKESLLEDFKGYLGCQALSEMIQFYLEEVMPQAENQDPDIKAHVNSLGENLKTLRLRLRRCHRFLPCENKSKAVEQVKNAFNKLQEKGIYKAMSEFDIFINYIEAYMTMKIRNGGGSGGGSPGQGTQSENSCTHFPGNLPNMLRDLRDAFSRVKTFFQMKDQLDNLLLKESLLEDFKGYLGCQALSEMIQFYLEEVMPQAENQDPDIKAHVNSLGENLKTLRLRLRRCHRFLPCENKSKAVEQVKNAFNKLQEKGIYKAMSEFDIFINYIEAYMTMKIRN

SEQ ID NO: 497 - protein, 160 aa, Homo sapiens
SPGQGTQSENSCTHFPGNLPNMLRDLRDAFSRVKTFFQMKDQLDNLLLKESLLEDFKGYLGCQALSEMIQFYLEEVMPQAENQDPDIKAHVNSLGENLKTLRLRLRRCHRFLPCENKSKAVEQVKNAFNKLQEKGIYKAMSEFDIFINYIEAYMTMKIRN

SEQ ID NO: 498 - protein, 8 aa, Artificial Sequence
  Description of Artificial Sequence: Synthetic peptide
GGGSGGGS

SEQ ID NO: 499 - protein, 243 aa, Artificial Sequence
  Description of Artificial Sequence: Synthetic polypeptide
ICSPPTTPPPPSCHPRLSLHRPALEDLLLGSEANLTCTLTGLRDASGVTFTWTPSSGKSAVQGPPERDLCGCYSVSSVLPGCAEPWNHGKTFTCTAAYPESKTPLTATLSKSGNTFRPEVHLLPPPSEELALNELVTLTCLARGFSPKDVLVRWLQGSQELPREKYLTWASRQEPSQGTTTFAVTSILRVAAEDWKKGDTFSCMVGHEALPLAFTQKTIDRLAGKPTHVNVSVVMAEVDGTCY

SEQ ID NO: 500 - protein, 11 aa, Artificial Sequence
  Description of Artificial Sequence: Synthetic peptide
ICSPPTTPPPP

SEQ ID NO: 501 - protein, 340 aa, Artificial Sequence
  Description of Artificial Sequence: Synthetic polypeptide
MGYKMNISSLRKAFIFMGAVAALSLVNAQSALAHADGSFSDEMNTILDNLAARDFINWLIQTKITDGGGGSGGGGSGGGGSGGGGSICSPPTTPPPPSCQPSLSLQRPALEDLLLGSDASITCTLNGLRDPEGAVFTWEPSTGKDAVQKKAVQNSCGCYSVSSVLPGCAERWNSGASFKCTVTHPESDTLTGTIAKVTVNTFPPQVHLLPPPSEELALNELVSLTCLVRAFNPKEVLVRWLHGNEELSPESYLVFEPLKEPGEGATTYLVTSVLRVSAEIWKQGDQYSCMVGHEALPMNFTQKTIDRLSGKPTNVSVSVIMSEGDGICYGCGHHHHHHHH

SEQ ID NO: 502 - protein, 329 aa, Artificial Sequence
  Description of Artificial Sequence: Synthetic polypeptide
MGYKMNISSLRKAFIFMGAVAALSLVNAQSALAHADGSFSDEMNTILDNLAARDFINWLIQTKITDGGGGSGGGGSGGGGSGGGGSICSPPTTPPPPSCQPSLSLQRPALEDLLLGSDASITCTLNGLRDPEGAVFTWEPSTGKDAVQKKAVQNSCGCYSVSSVLPGCAERWNSGASFKCTVTHPESDTLTGTIAKVTVNTFPPQVHLLPPPSEELALNELVSLTCLVRAFNPKEVLVRWLHGNEELSPESYLVFEPLKEPGEGATTYLVTSVLRVSAEIWKQGDQYSCMVGHEALPMNFTQKTIDRLSGKPTNVSVSVIMSEGDGICY

SEQ ID NO: 503 - protein, 328 aa, Artificial Sequence
  Description of Artificial Sequence: Synthetic polypeptide
MKQSTIALALLPLLFTPVTKAHADGSFSDEMNTILDNLAARDFINWLIQTKITDGGGGSGGGGSGGGGSGGGGSICSPPTTPPPPSCQPSLSLQRPALEDLLLGSDASITCTLNGLRDPEGAVFTWEPSTGKDAVQKKAVQNSCGCYSVSSVLPGCAERWNSGASFKCTVTHPESDTLTGTIAKVTVNTFPPQVHLLPPPSEELALNELVSLTCLVRAFNPKEVLVRWLHGNEELSPESYLVFEPLKEPGEGATTYLVTSVLRVSAEIWKQGDQYSCMVGHEALPMNFTQKTIDRLSGKPTNVSVSVIMSEGDGICYGCGHHHHHHHH

SEQ ID NO: 504 - protein, 317 aa, Artificial Sequence
  Description of Artificial Sequence: Synthetic polypeptide
MKQSTIALALLPLLFTPVTKAHADGSFSDEMNTILDNLAARDFINWLIQTKITDGGGGSGGGGSGGGGSGGGGSICSPPTTPPPPSCQPSLSLQRPALEDLLLGSDASITCTLNGLRDPEGAVFTWEPSTGKDAVQKKAVQNSCGCYSVSSVLPGCAERWNSGASFKCTVTHPESDTLTGTIAKVTVNTFPPQVHLLPPPSEELALNELVSLTCLVRAFNPKEVLVRWLHGNEELSPESYLVFEPLKEPGEGATTYLVTSVLRVSAEIWKQGDQYSCMVGHEALPMNFTQKTIDRLSGKPTNVSVSVIMSEGDGICY

SEQ ID NO: 505 - protein, 328 aa, Artificial Sequence
  Description of Artificial Sequence: Synthetic polypeptide
MKQSTIALALLPLLFTPVTKAHGDGSFSDEMNTILDNLAARDFINWLIQTKITDGGGGSGGGGSGGGGSGGGGSICSPPTTPPPPSCQPSLSLQRPALEDLLLGSDASITCTLNGLRDPEGAVFTWEPSTGKDAVQKKAVQNSCGCYSVSSVLPGCAERWNSGASFKCTVTHPESDTLTGTIAKVTVNTFPPQVHLLPPPSEELALNELVSLTCLVRAFNPKEVLVRWLHGNEELSPESYLVFEPLKEPGEGATTYLVTSVLRVSAEIWKQGDQYSCMVGHEALPMNFTQKTIDRLSGKPTNVSVSVIMSEGDGICYGSGHHHHHHHH

SEQ ID NO: 506 - protein, 317 aa, Artificial Sequence
  Description of Artificial Sequence: Synthetic polypeptide
MKQSTIALALLPLLFTPVTKAHGDGSFSDEMNTILDNLAARDFINWLIQTKITDGGGGSGGGGSGGGGSGGGGSICSPPTTPPPPSCQPSLSLQRPALEDLLLGSDASITCTLNGLRDPEGAVFTWEPSTGKDAVQKKAVQNSCGCYSVSSVLPGCAERWNSGASFKCTVTHPESDTLTGTIAKVTVNTFPPQVHLLPPPSEELALNELVSLTCLVRAFNPKEVLVRWLHGNEELSPESYLVFEPLKEPGEGATTYLVTSVLRVSAEIWKQGDQYSCMVGHEALPMNFTQKTIDRLSGKPTNVSVSVIMSEGDGICY

SEQ ID NO: 507 - protein, 340 aa, Artificial Sequence
  Description of Artificial Sequence: Synthetic polypeptide
MGYKMNISSLRKAFIFMGAVAALSLVNAQSALAHGDGSFSDEMNTILDNLAARDFINWLIQTKITDGGGGSGGGGSGGGGSGGGGSICSPPTTPPPPSCQPSLSLQRPALEDLLLGSDASITCTLNGLRDPEGAVFTWEPSTGKDAVQKKAVQNSCGCYSVSSVLPGCAERWNSGASFKCTVTHPESDTLTGTIAKVTVNTFPPQVHLLPPPSEELALNELVSLTCLVRAFNPKEVLVRWLHGNEELSPESYLVFEPLKEPGEGATTYLVTSVLRVSAEIWKQGDQYSCMVGHEALPMNFTQKTIDRLSGKPTNVSVSVIMSEGDGICYGSGHHHHHHHH

SEQ ID NO: 508 - protein, 329 aa, Artificial Sequence
  Description of Artificial Sequence: Synthetic polypeptide
MGYKMNISSLRKAFIFMGAVAALSLVNAQSALAHGDGSFSDEMNTILDNLAARDFINWLIQTKITDGGGGSGGGGSGGGGSGGGGSICSPPTTPPPPSCQPSLSLQRPALEDLLLGSDASITCTLNGLRDPEGAVFTWEPSTGKDAVQKKAVQNSCGCYSVSSVLPGCAERWNSGASFKCTVTHPESDTLTGTIAKVTVNTFPPQVHLLPPPSEELALNELVSLTCLVRAFNPKEVLVRWLHGNEELSPESYLVFEPLKEPGEGATTYLVTSVLRVSAEIWKQGDQYSCMVGHEALPMNFTQKTIDRLSGKPTNVSVSVIMSEGDGICY

SEQ ID NO: 509 - protein, 20 aa, Artificial Sequence
  Description of Artificial Sequence: Synthetic peptide
GGGGSGGGGSGGGGSGGGGS

SEQ ID NO: 510 - protein, 243 aa, Artificial Sequence
  Description of Artificial Sequence: Synthetic polypeptide
ICSPPTTPPPPSCQPSLSLQRPALEDLLLGSDASITCTLNGLRDPEGAVFTWEPSTGKDAVQKKAVQNSCGCYSVSSVLPGCAERWNSGASFKCTVTHPESDTLTGTIAKVTVNTFPPQVHLLPPPSEELALNELVSLTCLVRAFNPKEVLVRWLHGNEELSPESYLVFEPLKEPGEGATTYLVTSVLRVSAEIWKQGDQYSCMVGHEALPMNFTQKTIDRLSGKPTNVSVSVIMSEGDGICY

SEQ ID NO: 511 - protein, 329 aa, Artificial Sequence
  Description of Artificial Sequence: Synthetic polypeptide
MKQSTIALALLPLLFTPVTKAHADGSFSDEMNTILDNLAARDFINWLIQTKITDGGGGSGGGGSGGGGSGGGGSTICSPPTTPPPPSCHPRLSLHRPALEDLLLGSEANLTCTLTGLRDASGVTFTWTPSSGKSAVQGPPERDLCGCYSVSSVLPGCAEPWNHGKTFTCTAAYPESKTPLTATLSKSGNTFRPEVHLLPPPSEELALNELVTLTCLARGFSPKDVLVRWLQGSQELPREKYLTWASRQEPSQGTTTFAVTSILRVAAEDWKKGDTFSCMVGHEALPLAFTQKTIDRLAGKPTHVNVSVVMAEVDGTCYGSGHHHHHHHH

SEQ ID NO: 512 - protein, 318 aa, Artificial Sequence
  Description of Artificial Sequence: Synthetic polypeptide
MKQSTIALALLPLLFTPVTKAHADGSFSDEMNTILDNLAARDFINWLIQTKITDGGGGSGGGGSGGGGSGGGGSTICSPPTTPPPPSCHPRLSLHRPALEDLLLGSEANLTCTLTGLRDASGVTFTWTPSSGKSAVQGPPERDLCGCYSVSSVLPGCAEPWNHGKTFTCTAAYPESKTPLTATLSKSGNTFRPEVHLLPPPSEELALNELVTLTCLARGFSPKDVLVRWLQGSQELPREKYLTWASRQEPSQGTTTFAVTSILRVAAEDWKKGDTFSCMVGHEALPLAFTQKTIDRLAGKPTHVNVSVVMAEVDGTCY

SEQ ID NO: 513 - protein, 341 aa, Artificial Sequence
  Description of Artificial Sequence: Synthetic polypeptide
MGYKMNISSLRKAFIFMGAVAALSLVNAQSALAHADGSFSDEMNTILDNLAARDFINWLIQTKITDGGGGSGGGGSGGGGSGGGGSTICSPPTTPPPPSCHPRLSLHRPALEDLLLGSEANLTCTLTGLRDASGVTFTWTPSSGKSAVQGPPERDLCGCYSVSSVLPGCAEPWNHGKTFTCTAAYPESKTPLTATLSKSGNTFRPEVHLLPPPSEELALNELVTLTCLARGFSPKDVLVRWLQGSQELPREKYLTWASRQEPSQGTTTFAVTSILRVAAEDWKKGDTFSCMVGHEALPLAFTQKTIDRLAGKPTHVNVSVVMAEVDGTCYGSGHHHHHHHH

SEQ ID NO: 514 - protein, 330 aa, Artificial Sequence
  Description of Artificial Sequence: Synthetic polypeptide
MGYKMNISSLRKAFIFMGAVAALSLVNAQSALAHADGSFSDEMNTILDNLAARDFINWLIQTKITDGGGGSGGGGSGGGGSGGGGSTICSPPTTPPPPSCHPRLSLHRPALEDLLLGSEANLTCTLTGLRDASGVTFTWTPSSGKSAVQGPPERDLCGCYSVSSVLPGCAEPWNHGKTFTCTAAYPESKTPLTATLSKSGNTFRPEVHLLPPPSEELALNELVTLTCLARGFSPKDVLVRWLQGSQELPREKYLTWASRQEPSQGTTTFAVTSILRVAAEDWKKGDTFSCMVGHEALPLAFTQKTIDRLAGKPTHVNVSVVMAEVDGTCY

SEQ ID NO: 515 - DNA, 1020 bp, Artificial Sequence
  Description of Artificial Sequence: Synthetic polynucleotide
atggggtacaaaatgaacattagctcgcttcgcaaagcattcatttttatgggggctgttgcagctttaagccttgtcaatgcccagtcagcgcttgcccatgcggatggcagtttcagtgatgaaatgaacacgattttggataatttagcagccagggatttcataaactggttaattcaaactaaaataacggatggagggggtggttcgggcggcggtggcagtggaggcggtgggtctggcgggggtggatctatctgtagccccccgactacgcccccaccgccttcgtgtcagccttcgttgagcttacagcgccctgcattggaagacttattactggggagcgatgctagcatcacatgcacactgaatgggctgcgcgatccagaaggtgccgttttcacgtgggaaccaagcacgggcaaagacgccgtgcaaaagaaggcggtgcagaatagttgtggctgttacagtgtttcttccgttcttccgggttgcgctgaacgctggaactcgggggcgtctttcaaatgtactgtaacgcacccggaatctgacacacttactggaaccattgcgaaagtcacagtcaacacatttccccctcaagtacatctgcttcctcccccatcagaagagttagccctgaacgagttagtcagcctgacatgtcttgtccgcgcattcaatccgaaggaggtccttgtgcgctggttacacggcaatgaggagttatccccagagtcctatcttgtatttgaaccgcttaaagagccgggtgaaggcgcaaccacgtacttagttacgtcggtgcttcgcgtctcagccgaaatctggaagcagggcgaccagtacagctgtatggtcggccacgaagcccttccaatgaacttcactcaaaagacgatcgaccgcctgagtggtaagccaactaacgtcagcgtttccgtcattatgtcggagggggacggtatttgttacggatccggtcatcaccaccatcaccatcaccat

SEQ ID NO: 516 - DNA, 987 bp, Artificial Sequence
  Description of Artificial Sequence: Synthetic polynucleotide
atggggtacaaaatgaacattagctcgcttcgcaaagcattcatttttatgggggctgttgcagctttaagccttgtcaatgcccagtcagcgcttgcccatgcggatggcagtttcagtgatgaaatgaacacgattttggataatttagcagccagggatttcataaactggttaattcaaactaaaataacggatggagggggtggttcgggcggcggtggcagtggaggcggtgggtctggcgggggtggatctatctgtagccccccgactacgcccccaccgccttcgtgtcagccttcgttgagcttacagcgccctgcattggaagacttattactggggagcgatgctagcatcacatgcacactgaatgggctgcgcgatccagaaggtgccgttttcacgtgggaaccaagcacgggcaaagacgccgtgcaaaagaaggcggtgcagaatagttgtggctgttacagtgtttcttccgttcttccgggttgcgctgaacgctggaactcgggggcgtctttcaaatgtactgtaacgcacccggaatctgacacacttactggaaccattgcgaaagtcacagtcaacacatttccccctcaagtacatctgcttcctcccccatcagaagagttagccctgaacgagttagtcagcctgacatgtcttgtccgcgcattcaatccgaaggaggtccttgtgcgctggttacacggcaatgaggagttatccccagagtcctatcttgtatttgaaccgcttaaagagccgggtgaaggcgcaaccacgtacttagttacgtcggtgcttcgcgtctcagccgaaatctggaagcagggcgaccagtacagctgtatggtcggccacgaagcccttccaatgaacttcactcaaaagacgatcgaccgcctgagtggtaagccaactaacgtcagcgtttccgtcattatgtcggagggggacggtatttgttac

SEQ ID NO: 517 - DNA, 983 bp, Artificial Sequence
  Description of Artificial Sequence: Synthetic polynucleotide
aaacaatcgaccatcgcattggcgctgcttcctctattgttcacaccggtgacaaaggcacatgcggatggcagtttcagtgatgaaatgaacacgattttggataatttagcagccagggatttcataaactggttaattcaaactaaaataacggatggagggggtggttcgggcggcggtggcagtggaggcggtgggtctggcgggggtggatctatctgtagccccccgactacgcccccaccgccttcgtgtcagccttcgttgagcttacagcgccctgcattggaagacttattactggggagcgatgctagcatcacatgcacactgaatgggctgcgcgatccagaaggtgccgttttcacgtgggaaccaagcacgggcaaagacgccgtgcaaaagaaggcggtgcagaatagttgtggctgttacagtgtttcttccgttcttccgggttgcgctgaacgctggaactcgggggcgtctttcaaatgtactgtaacgcacccggaatctgacacacttactggaaccattgcgaaagtcacagtcaacacatttccccctcaagtacatctgcttcctcccccatcagaagagttagccctgaacgagttagtcagcctgacatgtcttgtccgcgcattcaatccgaaggaggtccttgtgcgctggttacacggcaatgaggagttatccccagagtcctatcttgtatttgaaccgcttaaagagccgggtgaaggcgcaaccacgtacttagttacgtcggtgcttcgcgtctcagccgaaatctggaagcagggcgaccagtacagctgtatggtcggccacgaagcccttccaatgaacttcactcaaaagacgatcgaccgcctgagtggtaagccaactaacgtcagcgtttccgtcattatgtcggagggggacggtatttgttacggatccggtcatcaccaccatcaccatcaccattg

SEQ ID NO: 518 - DNA, 948 bp, Artificial Sequence
  Description of Artificial Sequence: Synthetic polynucleotide
aaacaatcgaccatcgcattggcgctgcttcctctattgttcacaccggtgacaaaggcacatgcggatggcagtttcagtgatgaaatgaacacgattttggataatttagcagccagggatttcataaactggttaattcaaactaaaataacggatggagggggtggttcgggcggcggtggcagtggaggcggtgggtctggcgggggtggatctatctgtagccccccgactacgcccccaccgccttcgtgtcagccttcgttgagcttacagcgccctgcattggaagacttattactggggagcgatgctagcatcacatgcacactgaatgggctgcgcgatccagaaggtgccgttttcacgtgggaaccaagcacgggcaaagacgccgtgcaaaagaaggcggtgcagaatagttgtggctgttacagtgtttcttccgttcttccgggttgcgctgaacgctggaactcgggggcgtctttcaaatgtactgtaacgcacccggaatctgacacacttactggaaccattgcgaaagtcacagtcaacacatttccccctcaagtacatctgcttcctcccccatcagaagagttagccctgaacgagttagtcagcctgacatgtcttgtccgcgcattcaatccgaaggaggtccttgtgcgctggttacacggcaatgaggagttatccccagagtcctatcttgtatttgaaccgcttaaagagccgggtgaaggcgcaaccacgtacttagttacgtcggtgcttcgcgtctcagccgaaatctggaagcagggcgaccagtacagctgtatggtcggccacgaagcccttccaatgaacttcactcaaaagacgatcgaccgcctgagtggtaagccaactaacgtcagcgtttccgtcattatgtcggagggggacggtatttgttac

SEQ ID NO: 519 - DNA, 984 bp, Artificial Sequence
  Description of Artificial Sequence: Synthetic polynucleotide
atgaaacaatcgaccatcgcattggcgctgcttcctctattgttcacaccggtgacaaaggcacatggtgatggcagtttcagtgatgaaatgaacacgattttggataatttagcagccagggatttcataaactggttaattcaaactaaaataacggatggagggggtggttcgggcggcggtggcagtggaggcggtgggtctggcgggggtggatctatctgtagccccccgactacgcccccaccgccttcgtgtcagccttcgttgagcttacagcgccctgcattggaagacttattactggggagcgatgctagcatcacatgcacactgaatgggctgcgcgatccagaaggtgccgttttcacgtgggaaccaagcacgggcaaagacgccgtgcaaaagaaggcggtgcagaatagttgtggctgttacagtgtttcttccgttcttccgggttgcgctgaacgctggaactcgggggcgtctttcaaatgtactgtaacgcacccggaatctgacacacttactggaaccattgcgaaagtcacagtcaacacatttccccctcaagtacatctgcttcctcccccatcagaagagttagccctgaacgagttagtcagcctgacatgtcttgtccgcgcattcaatccgaaggaggtccttgtgcgctggttacacggcaatgaggagttatccccagagtcctatcttgtatttgaaccgcttaaagagccgggtgaaggcgcaaccacgtacttagttacgtcggtgcttcgcgtctcagccgaaatctggaagcagggcgaccagtacagctgtatggtcggccacgaagcccttccaatgaacttcactcaaaagacgatcgaccgcctgagtggtaagccaactaacgtcagcgtttccgtcattatgtcggagggggacggtatttgttacggatccggtcatcaccaccatcaccatcaccat

SEQ ID NO: 520 - DNA, 951 bp, Artificial Sequence
  Description of Artificial Sequence: Synthetic polynucleotide
atgaaacaatcgaccatcgcattggcgctgcttcctctattgttcacaccggtgacaaaggcacatggtgatggcagtttcagtgatgaaatgaacacgattttggataatttagcagccagggatttcataaactggttaattcaaactaaaataacggatggagggggtggttcgggcggcggtggcagtggaggcggtgggtctggcgggggtggatctatctgtagccccccgactacgcccccaccgccttcgtgtcagccttcgttgagcttacagcgccctgcattggaagacttattactggggagcgatgctagcatcacatgcacactgaatgggctgcgcgatccagaaggtgccgttttcacgtgggaaccaagcacgggcaaagacgccgtgcaaaagaaggcggtgcagaatagttgtggctgttacagtgtttcttccgttcttccgggttgcgctgaacgctggaactcgggggcgtctttcaaatgtactgtaacgcacccggaatctgacacacttactggaaccattgcgaaagtcacagtcaacacatttccccctcaagtacatctgcttcctcccccatcagaagagttagccctgaacgagttagtcagcctgacatgtcttgtccgcgcattcaatccgaaggaggtccttgtgcgctggttacacggcaatgaggagttatccccagagtcctatcttgtatttgaaccgcttaaagagccgggtgaaggcgcaaccacgtacttagttacgtcggtgcttcgcgtctcagccgaaatctggaagcagggcgaccagtacagctgtatggtcggccacgaagcccttccaatgaacttcactcaaaagacgatcgaccgcctgagtggtaagccaactaacgtcagcgtttccgtcattatgtcggagggggacggtatttgttac

SEQ ID NO: 521 - DNA, 1020 bp, Artificial Sequence
  Description of Artificial Sequence: Synthetic polynucleotide
atggggtacaaaatgaacattagctcgcttcgcaaagcattcatttttatgggggctgttgcagctttaagccttgtcaatgcccagtcagcgcttgcccatggtgatggcagtttcagtgatgaaatgaacacgattttggataatttagcagccagggatttcataaactggttaattcaaactaaaataacggatggagggggtggttcgggcggcggtggcagtggaggcggtgggtctggcgggggtggatctatctgtagccccccgactacgcccccaccgccttcgtgtcagccttcgttgagcttacagcgccctgcattggaagacttattactggggagcgatgctagcatcacatgcacactgaatgggctgcgcgatccagaaggtgccgttttcacgtgggaaccaagcacgggcaaagacgccgtgcaaaagaaggcggtgcagaatagttgtggctgttacagtgtttcttccgttcttccgggttgcgctgaacgctggaactcgggggcgtctttcaaatgtactgtaacgcacccggaatctgacacacttactggaaccattgcgaaagtcacagtcaacacatttccccctcaagtacatctgcttcctcccccatcagaagagttagccctgaacgagttagtcagcctgacatgtcttgtccgcgcattcaatccgaaggaggtccttgtgcgctggttacacggcaatgaggagttatccccagagtcctatcttgtatttgaaccgcttaaagagccgggtgaaggcgcaaccacgtacttagttacgtcggtgcttcgcgtctcagccgaaatctggaagcagggcgaccagtacagctgtatggtcggccacgaagcccttccaatgaacttcactcaaaagacgatcgaccgcctgagtggtaagccaactaacgtcagcgtttccgtcattatgtcggagggggacggtatttgttacggatccggtcatcaccaccatcaccatcaccat

SEQ ID NO: 522 - DNA, 987 bp, Artificial Sequence
  Description of Artificial Sequence: Synthetic polynucleotide
atggggtacaaaatgaacattagctcgcttcgcaaagcattcatttttatgggggctgttgcagctttaagccttgtcaatgcccagtcagcgcttgcccatggtgatggcagtttcagtgatgaaatgaacacgattttggataatttagcagccagggatttcataaactggttaattcaaactaaaataacggatggagggggtggttcgggcggcggtggcagtggaggcggtgggtctggcgggggtggatctatctgtagccccccgactacgcccccaccgccttcgtgtcagccttcgttgagcttacagcgccctgcattggaagacttattactggggagcgatgctagcatcacatgcacactgaatgggctgcgcgatccagaaggtgccgttttcacgtgggaaccaagcacgggcaaagacgccgtgcaaaagaaggcggtgcagaatagttgtggctgttacagtgtttcttccgttcttccgggttgcgctgaacgctggaactcgggggcgtctttcaaatgtactgtaacgcacccggaatctgacacacttactggaaccattgcgaaagtcacagtcaacacatttccccctcaagtacatctgcttcctcccccatcagaagagttagccctgaacgagttagtcagcctgacatgtcttgtccgcgcattcaatccgaaggaggtccttgtgcgctggttacacggcaatgaggagttatccccagagtcctatcttgtatttgaaccgcttaaagagccgggtgaaggcgcaaccacgtacttagttacgtcggtgcttcgcgtctcagccgaaatctggaagcagggcgaccagtacagctgtatggtcggccacgaagcccttccaatgaacttcactcaaaagacgatcgaccgcctgagtggtaagccaactaacgtcagcgtttccgtcattatgtcggagggggacggtatttgttac

SEQ ID NO: 523 - DNA, 99 bp, Homo sapiens
catgcggatggcagtttcagtgatgaaatgaacacgattttggataatttagcagccagggatttcataaactggttaattcaaactaaaataacggat

SEQ ID NO: 524 - DNA, 60 bp, Artificial Sequence
  Description of Artificial Sequence: Synthetic oligonucleotide
ggagggggtggttcgggcggcggtggcagtggaggcggtgggtctggcgggggtggatct

SEQ ID NO: 525 - DNA, 729 bp, Artificial Sequence
  Description of Artificial Sequence: Synthetic polynucleotide
atctgtagccccccgactacgcccccaccgccttcgtgtcagccttcgttgagcttacagcgccctgcattggaagacttattactggggagcgatgctagcatcacatgcacactgaatgggctgcgcgatccagaaggtgccgttttcacgtgggaaccaagcacgggcaaagacgccgtgcaaaagaaggcggtgcagaatagttgtggctgttacagtgtttcttccgttcttccgggttgcgctgaacgctggaactcgggggcgtctttcaaatgtactgtaacgcacccggaatctgacacacttactggaaccattgcgaaagtcacagtcaacacatttccccctcaagtacatctgcttcctcccccatcagaagagttagccctgaacgagttagtcagcctgacatgtcttgtccgcgcattcaatccgaaggaggtccttgtgcgctggttacacggcaatgaggagttatccccagagtcctatcttgtatttgaaccgcttaaagagccgggtgaaggcgcaaccacgtacttagttacgtcggtgcttcgcgtctcagccgaaatctggaagcagggcgaccagtacagctgtatggtcggccacgaagcccttccaatgaacttcactcaaaagacgatcgaccgcctgagtggtaagccaactaacgtcagcgtttccgtcattatgtcggagggggacggtatttgttac

SEQ ID NO: 526 - DNA, 99 bp, Artificial Sequence
  Description of Artificial Sequence: Synthetic oligonucleotide
catggtgatggcagtttcagtgatgaaatgaacacgattttggataatttagcagccagggatttcataaactggttaattcaaactaaaataacggat

SEQ ID NO: 527 - DNA, 729 bp, Artificial Sequence
  Description of Artificial Sequence: Synthetic polynucleotide
atctgtagccccccgactacgcccccaccgccttcgtgtcacccacgtctgtcactgcaccgtccagcattagaagacttactgctgggctccgaggcaaacctgacgtgtactttgacgggattgcgcgacgccagtggagtgacttttacgtggacgcctagcagcggcaaaagtgctgttcagggtccacccgagcgtgacttgtgcgggtgctactctgtgtcctcggtactgcccggctgcgcagagccctggaatcatggtaaaacgtttacctgtacagccgcctaccccgaaagtaaaactcctttgacagcaactctgagcaagtcgggtaatacatttcgtcccgaggttcatcttctgcctcccccttcggaagagcttgcattgaatgagctggtgacattaacctgtctggctcgtggttttagcccgaaagacgtacttgtccgttggctgcaagggagccaggaattgcctcgtgaaaagtatctgacttgggcaagccgccaagaacctagtcaggggacaacaaccttcgcggtaacaagcatcttacgtgttgcggctgaggactggaagaagggtgacacgttctcatgtatggtcggtcacgaggcgttaccacttgcgtttacacaaaagacgattgaccgccttgcgggcaagcctacgcacgtcaatgtcagtgtggtcatggctgaagtggatggaacctgctat

SEQ ID NO: 528 - DNA, 729 bp, Artificial Sequence
  Description of Artificial Sequence: Synthetic polynucleotide
atctgtagccccccgactacgcccccaccgccttcgtgtcacccacgtctgtcactgcaccgtccagcattagaagacttactgctgggctccgaggcaaacctgacgtgtactttgacgggattgcgcgacgccagtggagtgacttttacgtggacgcctagcagcggcaaaagtgctgttcagggtccacccgagcgtgacttgtgcgggtgctactctgtgtcctcggtactgcccggctgcgcagagccctggaatcatggtaaaacgtttacctgtacagccgcctaccccgaaagtaaaactcctttgacagcaactctgagcaagtcgggtaatacatttcgtcccgaggttcatcttctgcctcccccttcggaagagcttgcattgaatgagctggtgacattaacctgtctggctcgtggttttagcccgaaagacgtacttgtccgttggctgcaagggagccaggaattgcctcgtgaaaagtatctgacttgggcaagccgccaagaacctagtcaggggacaacaaccttcgcggtaacaagcatcttacgtgttgcggctgaggactggaagaagggtgacacgttctcatgtatggtcggtcacgaggcgttaccacttgcgtttacacaaaagacgattgaccgccttgcgggtaagcctacgcacgtcaatgtcagtgtggtcatggctgaagtggatggaacctgctat

SEQ ID NO: 529 - DNA, 983 bp, Artificial Sequence
  Description of Artificial Sequence: Synthetic polynucleotide
aaacaatcgaccatcgcattggcgctgcttcctctattgttcacaccggtgacaaaggcacatgcggatggcagtttcagtgatgaaatgaacacgattttggataatttagcagccagggatttcataaactggttaattcaaactaaaataacggatggagggggtggttcgggcggcggtggcagtggaggcggtgggtctggcgggggtggtaccatctgtagccccccgactacgcccccaccgccttcgtgtcacccacgtctgtcactgcaccgtccagcattagaagacttactgctgggctccgaggcaaacctgacgtgtactttgacgggattgcgcgacgccagtggagtgacttttacgtggacgcctagcagcggcaaaagtgctgttcagggtccacccgagcgtgacttgtgcgggtgctactctgtgtcctcggtactgcccggctgcgcagagccctggaatcatggtaaaacgtttacctgtacagccgcctaccccgaaagtaaaactcctttgacagcaactctgagcaagtcgggtaatacatttcgtcccgaggttcatcttctgcctcccccttcggaagagcttgcattgaatgagctggtgacattaacctgtctggctcgtggttttagcccgaaagacgtacttgtccgttggctgcaagggagccaggaattgcctcgtgaaaagtatctgacttgggcaagccgccaagaacctagtcaggggacaacaaccttcgcggtaacaagcatcttacgtgttgcggctgaggactggaagaagggtgacacgttctcatgtatggtcggtcacgaggcgttaccacttgcgtttacacaaaagacgattgaccgccttgcgggcaagcctacgcacgtcaatgtcagtgtggtcatggctgaagtggatggaacctgctatggatccggtcatcaccaccatcaccatcaccattg

SEQ ID NO: 530 - DNA, 983 bp, Artificial Sequence
  Description of Artificial Sequence: Synthetic polynucleotide
aaacaatcgaccatcgcattggcgctgcttcctctattgttcacaccggtgacaaaggcacatgcggatggcagtttcagtgatgaaatgaacacgattttggataatttagcagccagggatttcataaactggttaattcaaactaaaataacggatggagggggtggttcgggcggcggtggcagtggaggcggtgggtctggcgggggtggtaccatctgtagccccccgactacgcccccaccgccttcgtgtcacccacgtctgtcactgcaccgtccagcattagaagacttactgctgggctccgaggcaaacctgacgtgtactttgacgggattgcgcgacgccagtggagtgacttttacgtggacgcctagcagcggcaaaagtgctgttcagggtccacccgagcgtgacttgtgcgggtgctactctgtgtcctcggtactgcccggctgcgcagagccctggaatcatggtaaaacgtttacctgtacagccgcctaccccgaaagtaaaactcctttgacagcaactctgagcaagtcgggtaatacatttcgtcccgaggttcatcttctgcctcccccttcggaagagcttgcattgaatgagctggtgacattaacctgtctggctcgtggttttagcccgaaagacgtacttgtccgttggctgcaagggagccaggaattgcctcgtgaaaagtatctgacttgggcaagccgccaagaacctagtcaggggacaacaaccttcgcggtaacaagcatcttacgtgttgcggctgaggactggaagaagggtgacacgttctcatgtatggtcggtcacgaggcgttaccacttgcgtttacacaaaagacgattgaccgccttgcgggtaagcctacgcacgtcaatgtcagtgtggtcatggctgaagtggatggaacctgctatggatccggtcatcaccaccatcaccatcaccattg

SEQ ID NO: 531 - DNA, 948 bp, Artificial Sequence
  Description of Artificial Sequence: Synthetic polynucleotide
aaacaatcgaccatcgcattggcgctgcttcctctattgttcacaccggtgacaaaggcacatgcggatggcagtttcagtgatgaaatgaacacgattttggataatttagcagccagggatttcataaactggttaattcaaactaaaataacggatggagggggtggttcgggcggcggtggcagtggaggcggtgggtctggcgggggtggtaccatctgtagccccccgactacgcccccaccgccttcgtgtcacccacgtctgtcactgcaccgtccagcattagaagacttactgctgggctccgaggcaaacctgacgtgtactttgacgggattgcgcgacgccagtggagtgacttttacgtggacgcctagcagcggcaaaagtgctgttcagggtccacccgagcgtgacttgtgcgggtgctactctgtgtcctcggtactgcccggctgcgcagagccctggaatcatggtaaaacgtttacctgtacagccgcctaccccgaaagtaaaactcctttgacagcaactctgagcaagtcgggtaatacatttcgtcccgaggttcatcttctgcctcccccttcggaagagcttgcattgaatgagctggtgacattaacctgtctggctcgtggttttagcccgaaagacgtacttgtccgttggctgcaagggagccaggaattgcctcgtgaaaagtatctgacttgggcaagccgccaagaacctagtcaggggacaacaaccttcgcggtaacaagcatcttacgtgttgcggctgaggactggaagaagggtgacacgttctcatgtatggtcggtcacgaggcgttaccacttgcgtttacacaaaagacgattgaccgccttgcgggcaagcctacgcacgtcaatgtcagtgtggtcatggctgaagtggatggaacctgctat

SEQ ID NO: 532 - DNA, 948 bp, Artificial Sequence
  Description of Artificial Sequence: Synthetic polynucleotide
aaacaatcgaccatcgcattggcgctgcttcctctattgttcacaccggtgacaaaggcacatgcggatggcagtttcagtgatgaaatgaacacgattttggataatttagcagccagggatttcataaactggttaattcaaactaaaataacggatggagggggtggttcgggcggcggtggcagtggaggcggtgggtctggcgggggtggtaccatctgtagccccccgactacgcccccaccgccttcgtgtcacccacgtctgtcactgcaccgtccagcattagaagacttactgctgggctccgaggcaaacctgacgtgtactttgacgggattgcgcgacgccagtggagtgacttttacgtggacgcctagcagcggcaaaagtgctgttcagggtccacccgagcgtgacttgtgcgggtgctactctgtgtcctcggtactgcccggctgcgcagagccctggaatcatggtaaaacgtttacctgtacagccgcctaccccgaaagtaaaactcctttgacagcaactctgagcaagtcgggtaatacatttcgtcccgaggttcatcttctgcctcccccttcggaagagcttgcattgaatgagctggtgacattaacctgtctggctcgtggttttagcccgaaagacgtacttgtccgttggctgcaagggagccaggaattgcctcgtgaaaagtatctgacttgggcaagccgccaagaacctagtcaggggacaacaaccttcgcggtaacaagcatcttacgtgttgcggctgaggactggaagaagggtgacacgttctcatgtatggtcggtcacgaggcgttaccacttgcgtttacacaaaagacgattgaccgccttgcgggtaagcctacgcacgtcaatgtcagtgtggtcatggctgaagtggatggaacctgctat

SEQ ID NO: 533 - DNA, 1020 bp, Artificial Sequence
  Description of Artificial Sequence: Synthetic polynucleotide
atggggtacaaaatgaacattagctcgcttcgcaaagcattcatttttatgggggctgttgcagctttaagccttgtcaatgcccagtcagcgcttgcccatgcggatggcagtttcagtgatgaaatgaacacgattttggataatttagcagccagggatttcataaactggttaattcaaactaaaataacggatggagggggtggttcgggcggcggtggcagtggaggcggtgggtctggcgggggtggtaccatctgtagccccccgactacgcccccaccgccttcgtgtcacccacgtctgtcactgcaccgtccagcattagaagacttactgctgggctccgaggcaaacctgacgtgtactttgacgggattgcgcgacgccagtggagtgacttttacgtggacgcctagcagcggcaaaagtgctgttcagggtccacccgagcgtgacttgtgcgggtgctactctgtgtcctcggtactgcccggctgcgcagagccctggaatcatggtaaaacgtttacctgtacagccgcctaccccgaaagtaaaactcctttgacagcaactctgagcaagtcgggtaatacatttcgtcccgaggttcatcttctgcctcccccttcggaagagcttgcattgaatgagctggtgacattaacctgtctggctcgtggttttagcccgaaagacgtacttgtccgttggctgcaagggagccaggaattgcctcgtgaaaagtatctgacttgggcaagccgccaagaacctagtcaggggacaacaaccttcgcggtaacaagcatcttacgtgttgcggctgaggactggaagaagggtgacacgttctcatgtatggtcggtcacgaggcgttaccacttgcgtttacacaaaagacgattgaccgccttgcgggcaagcctacgcacgtcaatgtcagtgtggtcatggctgaagtggatggaacctgctatggatccggtcatcaccaccatcaccatcaccat

SEQ ID NO: 534 - DNA, 1020 bp, Artificial Sequence
  Description of Artificial Sequence: Synthetic polynucleotide
atggggtacaaaatgaacattagctcgcttcgcaaagcattcatttttatgggggctgttgcagctttaagccttgtcaatgcccagtcagcgcttgcccatgcggatggcagtttcagtgatgaaatgaacacgattttggataatttagcagccagggatttcataaactggttaattcaaactaaaataacggatggagggggtggttcgggcggcggtggcagtggaggcggtgggtctggcgggggtggtaccatctgtagccccccgactacgcccccaccgccttcgtgtcacccacgtctgtcactgcaccgtccagcattagaagacttactgctgggctccgaggcaaacctgacgtgtactttgacgggattgcgcgacgccagtggagtgacttttacgtggacgcctagcagcggcaaaagtgctgttcagggtccacccgagcgtgacttgtgcgggtgctactctgtgtcctcggtactgcccggctgcgcagagccctggaatcatggtaaaacgtttacctgtacagccgcctaccccgaaagtaaaactcctttgacagcaactctgagcaagtcgggtaatacatttcgtcccgaggttcatcttctgcctcccccttcggaagagcttgcattgaatgagctggtgacattaacctgtctggctcgtggttttagcccgaaagacgtacttgtccgttggctgcaagggagccaggaattgcctcgtgaaaagtatctgacttgggcaagccgccaagaacctagtcaggggacaacaaccttcgcggtaacaagcatcttacgtgttgcggctgaggactggaagaagggtgacacgttctcatgtatggtcggtcacgaggcgttaccacttgcgtttacacaaaagacgattgaccgccttgcgggtaagcctacgcacgtcaatgtcagtgtggtcatggctgaagtggatggaacctgctatggatccggtcatcaccaccatcaccatcaccat

SEQ ID NO: 535 - DNA, 987 bp, Artificial Sequence
  Description of Artificial Sequence: Synthetic polynucleotide
atggggtacaaaatgaacattagctcgcttcgcaaagcattcatttttatgggggctgttgcagctttaagccttgtcaatgcccagtcagcgcttgcccatgcggatggcagtttcagtgatgaaatgaacacgattttggataatttagcagccagggatttcataaactggttaattcaaactaaaataacggatggagggggtggttcgggcggcggtggcagtggaggcggtgggtctggcgggggtggtaccatctgtagccccccgactacgcccccaccgccttcgtgtcacccacgtctgtcactgcaccgtccagcattagaagacttactgctgggctccgaggcaaacctgacgtgtactttgacgggattgcgcgacgccagtggagtgacttttacgtggacgcctagcagcggcaaaagtgctgttcagggtccacccgagcgtgacttgtgcgggtgctactctgtgtcctcggtactgcccggctgcgcagagccctggaatcatggtaaaacgtttacctgtacagccgcctaccccgaaagtaaaactcctttgacagcaactctgagcaagtcgggtaatacatttcgtcccgaggttcatcttctgcctcccccttcggaagagcttgcattgaatgagctggtgacattaacctgtctggctcgtggttttagcccgaaagacgtacttgtccgttggctgcaagggagccaggaattgcctcgtgaaaagtatctgacttgggcaagccgccaagaacctagtcaggggacaacaaccttcgcggtaacaagcatcttacgtgttgcggctgaggactggaagaagggtgacacgttctcatgtatggtcggtcacgaggcgttaccacttgcgtttacacaaaagacgattgaccgccttgcgggcaagcctacgcacgtcaatgtcagtgtggtcatggctgaagtggatggaacctgctat

SEQ ID NO: 536 - DNA, 987 bp, Artificial Sequence
  Description of Artificial Sequence: Synthetic polynucleotide
atggggtacaaaatgaacattagctcgcttcgcaaagcattcatttttatgggggctgttgcagctttaagccttgtcaatgcccagtcagcgcttgcccatgcggatggcagtttcagtgatgaaatgaacacgattttggataatttagcagccagggatttcataaactggttaattcaaactaaaataacggatggagggggtggttcgggcggcggtggcagtggaggcggtgggtctggcgggggtggtaccatctgtagccccccgactacgcccccaccgccttcgtgtcacccacgtctgtcactgcaccgtccagcattagaagacttactgctgggctccgaggcaaacctgacgtgtactttgacgggattgcgcgacgccagtggagtgacttttacgtggacgcctagcagcggcaaaagtgctgttcagggtccacccgagcgtgacttgtgcgggtgctactctgtgtcctcggtactgcccggctgcgcagagccctggaatcatggtaaaacgtttacctgtacagccgcctaccccgaaagtaaaactcctttgacagcaactctgagcaagtcgggtaatacatttcgtcccgaggttcatcttctgcctcccccttcggaagagcttgcattgaatgagctggtgacattaacctgtctggctcgtggttttagcccgaaagacgtacttgtccgttggctgcaagggagccaggaattgcctcgtgaaaagtatctgacttgggcaagccgccaagaacctagtcaggggacaacaaccttcgcggtaacaagcatcttacgtgttgcggctgaggactggaagaagggtgacacgttctcatgtatggtcggtcacgaggcgttaccacttgcgtttacacaaaagacgattgaccgccttgcgggtaagcctacgcacgtcaatgtcagtgtggtcatggctgaagtggatggaacctgctat

SEQ ID NO: 537 - protein, 297 aa, Artificial Sequence
  Description of Artificial Sequence: Synthetic polypeptide
HADGSFSDEMNTILDNLAARDFINWLIQTKITDGGGGSGGGGSGGGGSGGGGSTICSPPTTPPPPSCHPRLSLHRPALEDLLLGSEANLTCTLTGLRDASGVTFTWTPSSGKSAVQGPPERDLCGCYSVSSVLPGCAEPWNHGKTFTCTAAYPESKTPLTATLSKSGNTFRPEVHLLPPPSEELALNELVTLTCLARGFSPKDVLVRWLQGSQELPREKYLTWASRQEPSQGTTTFAVTSILRVAAEDWKKGDTFSCMVGHEALPLAFTQKTIDRLAGKPTHVNVSVVMAEVDGTCY

SEQ ID NO: 538 - protein, 54 aa, Artificial Sequence
  Description of Artificial Sequence: Synthetic polypeptide
MKQSTIALALLPLLFTPVTKAHADGSFSDEMNTILDNLAARDFINWLIQTKITD

SEQ ID NO: 539 - protein, 66 aa, Artificial Sequence
  Description of Artificial Sequence: Synthetic polypeptide
MGYKMNISSLRKAFIFMGAVAALSLVNAQSALAHADGSFSDEMNTILDNLAARDFINWLIQTKITD

SEQ ID NO: 540 - protein, 296 aa, Artificial Sequence
  Description of Artificial Sequence: Synthetic polypeptide
HGDGSFSDEMNTILDNLAARDFINWLIQTKITDGGGGSGGGGSGGGGSGGGGSICSPPTTPPPPSCHPRLSLHRPALEDLLLGSEANLTCTLTGLRDASGVTFTWTPSSGKSAVQGPPERDLCGCYSVSSVLPGCAEPWNHGKTFTCTAAYPESKTPLTATLSKSGNTFRPEVHLLPPPSEELALNELVTLTCLARGFSPKDVLVRWLQGSQELPREKYLTWASRQEPSQGTTTFAVTSILRVAAEDWKKGDTFSCMVGHEALPLAFTQKTIDRLAGKPTHVNVSVVMAEVDGTCY

SEQ ID NO: 541 - protein, 54 aa, Artificial Sequence
  Description of Artificial Sequence: Synthetic polypeptide
MKQSTIALALLPLLFTPVTKAHGDGSFSDEMNTILDNLAARDFINWLIQTKITD

SEQ ID NO: 542 - protein, 66 aa, Artificial Sequence
  Description of Artificial Sequence: Synthetic polypeptide
MGYKMNISSLRKAFIFMGAVAALSLVNAQSALAHGDGSFSDEMNTILDNLAARDFINWLIQTKITD

SEQ ID NO: 543 - protein, 328 aa, Artificial Sequence
  Description of Artificial Sequence: Synthetic polypeptide
MKQSTIALALLPLLFTPVTKAHGDGSFSDEMNTILDNLAARDFINWLIQTKITDGGGGSGGGGSGGGGSGGGGSICSPPTTPPPPSCHPRLSLHRPALEDLLLGSEANLTCTLTGLRDASGVTFTWTPSSGKSAVQGPPERDLCGCYSVSSVLPGCAEPWNHGKTFTCTAAYPESKTPLTATLSKSGNTFRPEVHLLPPPSEELALNELVTLTCLARGFSPKDVLVRWLQGSQELPREKYLTWASRQEPSQGTTTFAVTSILRVAAEDWKKGDTFSCMVGHEALPLAFTQKTIDRLAGKPTHVNVSVVMAEVDGTCYGSGHHHHHHHH

SEQ ID NO: 544 - protein, 317 aa, Artificial Sequence
  Description of Artificial Sequence: Synthetic polypeptide
MKQSTIALALLPLLFTPVTKAHGDGSFSDEMNTILDNLAARDFINWLIQTKITDGGGGSGGGGSGGGGSGGGGSICSPPTTPPPPSCHPRLSLHRPALEDLLLGSEANLTCTLTGLRDASGVTFTWTPSSGKSAVQGPPERDLCGCYSVSSVLPGCAEPWNHGKTFTCTAAYPESKTPLTATLSKSGNTFRPEVHLLPPPSEELALNELVTLTCLARGFSPKDVLVRWLQGSQELPREKYLTWASRQEPSQGTTTFAVTSILRVAAEDWKKGDTFSCMVGHEALPLAFTQKTIDRLAGKPTHVNVSVVMAEVDGTCY

SEQ ID NO: 545 - protein, 340 aa, Artificial Sequence
  Description of Artificial Sequence: Synthetic polypeptide
MGYKMNISSLRKAFIFMGAVAALSLVNAQSALAHGDGSFSDEMNTILDNLAARDFINWLIQTKITDGGGGSGGGGSGGGGSGGGGSICSPPTTPPPPSCHPRLSLHRPALEDLLLGSEANLTCTLTGLRDASGVTFTWTPSSGKSAVQGPPERDLCGCYSVSSVLPGCAEPWNHGKTFTCTAAYPESKTPLTATLSKSGNTFRPEVHLLPPPSEELALNELVTLTCLARGFSPKDVLVRWLQGSQELPREKYLTWASRQEPSQGTTTFAVTSILRVAAEDWKKGDTFSCMVGHEALPLAFTQKTIDRLAGKPTHVNVSVVMAEVDGTCYGSGHHHHHHHH

SEQ ID NO: 546 - protein, 329 aa, Artificial Sequence
  Description of Artificial Sequence: Synthetic polypeptide
MGYKMNISSLRKAFIFMGAVAALSLVNAQSALAHGDGSFSDEMNTILDNLAARDFINWLIQTKITDGGGGSGGGGSGGGGSGGGGSICSPPTTPPPPSCHPRLSLHRPALEDLLLGSEANLTCTLTGLRDASGVTFTWTPSSGKSAVQGPPERDLCGCYSVSSVLPGCAEPWNHGKTFTCTAAYPESKTPLTATLSKSGNTFRPEVHLLPPPSEELALNELVTLTCLARGFSPKDVLVRWLQGSQELPREKYLTWASRQEPSQGTTTFAVTSILRVAAEDWKKGDTFSCMVGHEALPLAFTQKTIDRLAGKPTHVNVSVVMAEVDGTCY

SEQ ID NO: 547 - DNA, 888 bp, Artificial Sequence
  Description of Artificial Sequence: Synthetic polynucleotide
catgcggatggcagtttcagtgatgaaatgaacacgattttggataatttagcagccagggatttcataaactggttaattcaaactaaaataacggatggagggggtggttcgggcggcggtggcagtggaggcggtgggtctggcgggggtggtaccatctgtagccccccgactacgcccccaccgccttcgtgtcacccacgtctgtcactgcaccgtccagcattagaagacttactgctgggctccgaggcaaacctgacgtgtactttgacgggattgcgcgacgccagtggagtgacttttacgtggacgcctagcagcggcaaaagtgctgttcagggtccacccgagcgtgacttgtgcgggtgctactctgtgtcctcggtactgcccggctgcgcagagccctggaatcatggtaaaacgtttacctgtacagccgcctaccccgaaagtaaaactcctttgacagcaactctgagcaagtcgggtaatacatttcgtcccgaggttcatcttctgcctcccccttcggaagagcttgcattgaatgagctggtgacattaacctgtctggctcgtggttttagcccgaaagacgtacttgtccgttggctgcaagggagccaggaattgcctcgtgaaaagtatctgacttgggcaagccgccaagaacctagtcaggggacaacaaccttcgcggtaacaagcatcttacgtgttgcggctgaggactggaagaagggtgacacgttctcatgtatggtcggtcacgaggcgttaccacttgcgtttacacaaaagacgattgaccgccttgcgggcaagcctacgcacgtcaatgtcagtgtggtcatggctgaagtggatggaacctgctat

SEQ ID NO: 548 - DNA, 888 bp, Artificial Sequence
  Description of Artificial Sequence: Synthetic polynucleotide
catgcggatggcagtttcagtgatgaaatgaacacgattttggataatttagcagccagggatttcataaactggttaattcaaactaaaataacggatggagggggtggttcgggcggcggtggcagtggaggcggtgggtctggcgggggtggtaccatctgtagccccccgactacgcccccaccgccttcgtgtcacccacgtctgtcactgcaccgtccagcattagaagacttactgctgggctccgaggcaaacctgacgtgtactttgacgggattgcgcgacgccagtggagtgacttttacgtggacgcctagcagcggcaaaagtgctgttcagggtccacccgagcgtgacttgtgcgggtgctactctgtgtcctcggtactgcccggctgcgcagagccctggaatcatggtaaaacgtttacctgtacagccgcctaccccgaaagtaaaactcctttgacagcaactctgagcaagtcgggtaatacatttcgtcccgaggttcatcttctgcctcccccttcggaagagcttgcattgaatgagctggtgacattaacctgtctggctcgtggttttagcccgaaagacgtacttgtccgttggctgcaagggagccaggaattgcctcgtgaaaagtatctgacttgggcaagccgccaagaacctagtcaggggacaacaaccttcgcggtaacaagcatcttacgtgttgcggctgaggactggaagaagggtgacacgttctcatgtatggtcggtcacgaggcgttaccacttgcgtttacacaaaagacgattgaccgccttgcgggtaagcctacgcacgtcaatgtcagtgtggtcatggctgaagtggatggaacctgctat

SEQ ID NO: 549 - DNA, 159 bp, Artificial Sequence
  Description of Artificial Sequence: Synthetic polynucleotide
aaacaatcgaccatcgcattggcgctgcttcctctattgttcacaccggtgacaaaggcacatgcggatggcagtttcagtgatgaaatgaacacgattttggataatttagcagccagggatttcataaactggttaattcaaactaaaataacggat

SEQ ID NO: 550 - DNA, 198 bp, Artificial Sequence
  Description of Artificial Sequence: Synthetic polynucleotide
atggggtacaaaatgaacattagctcgcttcgcaaagcattcatttttatgggggctgttgcagctttaagccttgtcaatgcccagtcagcgcttgcccatgcggatggcagtttcagtgatgaaatgaacacgattttggataatttagcagccagggatttcataaactggttaattcaaactaaaataacggat

SEQ ID NO: 551 - DNA, 983 bp, Artificial Sequence
  Description of Artificial Sequence: Synthetic polynucleotide
aaacaatcgaccatcgcattggcgctgcttcctctattgttcacaccggtgacaaaggcacatggtgatggcagtttcagtgatgaaatgaacacgattttggataatttagcagccagggatttcataaactggttaattcaaactaaaataacggatggagggggtggttcgggcggcggtggcagtggaggcggtgggtctggcgggggtggtaccatctgtagccccccgactacgcccccaccgccttcgtgtcacccacgtctgtcactgcaccgtccagcattagaagacttactgctgggctccgaggcaaacctgacgtgtactttgacgggattgcgcgacgccagtggagtgacttttacgtggacgcctagcagcggcaaaagtgctgttcagggtccacccgagcgtgacttgtgcgggtgctactctgtgtcctcggtactgcccggctgcgcagagccctggaatcatggtaaaacgtttacctgtacagccgcctaccccgaaagtaaaactcctttgacagcaactctgagcaagtcgggtaatacatttcgtcccgaggttcatcttctgcctcccccttcggaagagcttgcattgaatgagctggtgacattaacctgtctggctcgtggttttagcccgaaagacgtacttgtccgttggctgcaagggagccaggaattgcctcgtgaaaagtatctgacttgggcaagccgccaagaacctagtcaggggacaacaaccttcgcggtaacaagcatcttacgtgttgcggctgaggactggaagaagggtgacacgttctcatgtatggtcggtcacgaggcgttaccacttgcgtttacacaaaagacgattgaccgccttgcgggcaagcctacgcacgtcaatgtcagtgtggtcatggctgaagtggatggaacctgctatggatccggtcatcaccaccatcaccatcaccattg

SEQ ID NO: 552 - DNA, 983 bp, Artificial Sequence
  Description of Artificial Sequence: Synthetic polynucleotide
aaacaatcgaccatcgcattggcgctgcttcctctattgttcacaccggtgacaaaggcacatggtgatggcagtttcagtgatgaaatgaacacgattttggataatttagcagccagggatttcataaactggttaattcaaactaaaataacggatggagggggtggttcgggcggcggtggcagtggaggcggtgggtctggcgggggtggtaccatctgtagccccccgactacgcccccaccgccttcgtgtcacccacgtctgtcactgcaccgtccagcattagaagacttactgctgggctccgaggcaaacctgacgtgtactttgacgggattgcgcgacgccagtggagtgacttttacgtggacgcctagcagcggcaaaagtgctgttcagggtccacccgagcgtgacttgtgcgggtgctactctgtgtcctcggtactgcccggctgcgcagagccctggaatcatggtaaaacgtttacctgtacagccgcctaccccgaaagtaaaactcctttgacagcaactctgagcaagtcgggtaatacatttcgtcccgaggttcatcttctgcctcccccttcggaagagcttgcattgaatgagctggtgacattaacctgtctggctcgtggttttagcccgaaagacgtacttgtccgttggctgcaagggagccaggaattgcctcgtgaaaagtatctgacttgggcaagccgccaagaacctagtcaggggacaacaaccttcgcggtaacaagcatcttacgtgttgcggctgaggactggaagaagggtgacacgttctcatgtatggtcggtcacgaggcgttaccacttgcgtttacacaaaagacgattgaccgccttgcgggtaagcctacgcacgtcaatgtcagtgtggtcatggctgaagtggatggaacctgctatggatccggtcatcaccaccatcaccatcaccattg

SEQ ID NO: 553 - DNA, 948 bp, Artificial Sequence
  Description of Artificial Sequence: Synthetic polynucleotide
aaacaatcgaccatcgcattggcgctgcttcctctattgttcacaccggtgacaaaggcacatggtgatggcagtttcagtgatgaaatgaacacgattttggataatttagcagccagggatttcataaactggttaattcaaactaaaataacggatggagggggtggttcgggcggcggtggcagtggaggcggtgggtctggcgggggtggtaccatctgtagccccccgactacgcccccaccgccttcgtgtcacccacgtctgtcactgcaccgtccagcattagaagacttactgctgggctccgaggcaaacctgacgtgtactttgacgggattgcgcgacgccagtggagtgacttttacgtggacgcctagcagcggcaaaagtgctgttcagggtccacccgagcgtgacttgtgcgggtgctactctgtgtcctcggtactgcccggctgcgcagagccctggaatcatggtaaaacgtttacctgtacagccgcctaccccgaaagtaaaactcctttgacagcaactctgagcaagtcgggtaatacatttcgtcccgaggttcatcttctgcctcccccttcggaagagcttgcattgaatgagctggtgacattaacctgtctggctcgtggttttagcccgaaagacgtacttgtccgttggctgcaagggagccaggaattgcctcgtgaaaagtatctgacttgggcaagccgccaagaacctagtcaggggacaacaaccttcgcggtaacaagcatcttacgtgttgcggctgaggactggaagaagggtgacacgttctcatgtatggtcggtcacgaggcgttaccacttgcgtttacacaaaagacgattgaccgccttgcgggcaagcctacgcacgtcaatgtcagtgtggtcatggctgaagtggatggaacctgctat

SEQ ID NO: 554 - DNA, 948 bp, Artificial Sequence
  Description of Artificial Sequence: Synthetic polynucleotide
aaacaatcgaccatcgcattggcgctgcttcctctattgttcacaccggtgacaaaggcacatggtgatggcagtttcagtgatgaaatgaacacgattttggataatttagcagccagggatttcataaactggttaattcaaactaaaataacggatggagggggtggttcgggcggcggtggcagtggaggcggtgggtctggcgggggtggtaccatctgtagccccccgactacgcccccaccgccttcgtgtcacccacgtctgtcactgcaccgtccagcattagaagacttactgctgggctccgaggcaaacctgacgtgtactttgacgggattgcgcgacgccagtggagtgacttttacgtggacgcctagcagcggcaaaagtgctgttcagggtccacccgagcgtgacttgtgcgggtgctactctgtgtcctcggtactgcccggctgcgcagagccctggaatcatggtaaaacgtttacctgtacagccgcctaccccgaaagtaaaactcctttgacagcaactctgagcaagtcgggtaatacatttcgtcccgaggttcatcttctgcctcccccttcggaagagcttgcattgaatgagctggtgacattaacctgtctggctcgtggttttagcccgaaagacgtacttgtccgttggctgcaagggagccaggaattgcctcgtgaaaagtatctgacttgggcaagccgccaagaacctagtcaggggacaacaaccttcgcggtaacaagcatcttacgtgttgcggctgaggactggaagaagggtgacacgttctcatgtatggtcggtcacgaggcgttaccacttgcgtttacacaaaagacgattgaccgccttgcgggtaagcctacgcacgtcaatgtcagtgtggtcatggctgaagtggatggaacctgctat

SEQ ID NO: 555 - DNA, 1020 bp, Artificial Sequence
  Description of Artificial Sequence: Synthetic polynucleotide
atggggtacaaaatgaacattagctcgcttcgcaaagcattcatttttatgggggctgttgcagctttaagccttgtcaatgcccagtcagcgcttgcccatggtgatggcagtttcagtgatgaaatgaacacgattttggataatttagcagccagggatttcataaactggttaattcaaactaaaataacggatggagggggtggttcgggcggcggtggcagtggaggcggtgggtctggcgggggtggtaccatctgtagccccccgactacgcccccaccgccttcgtgtcacccacgtctgtcactgcaccgtccagcattagaagacttactgctgggctccgaggcaaacctgacgtgtactttgacgggattgcgcgacgccagtggagtgacttttacgtggacgcctagcagcggcaaaagtgctgttcagggtccacccgagcgtgacttgtgcgggtgctactctgtgtcctcggtactgcccggctgcgcagagccctggaatcatggtaaaacgtttacctgtacagccgcctaccccgaaagtaaaactcctttgacagcaactctgagcaagtcgggtaatacatttcgtcccgaggttcatcttctgcctcccccttcggaagagcttgcattgaatgagctggtgacattaacctgtctggctcgtggttttagcccgaaagacgtacttgtccgttggctgcaagggagccaggaattgcctcgtgaaaagtatctgacttgggcaagccgccaagaacctagtcaggggacaacaaccttcgcggtaacaagcatcttacgtgttgcggctgaggactggaagaagggtgacacgttctcatgtatggtcggtcacgaggcgttaccacttgcgtttacacaaaagacgattgaccgccttgcgggcaagcctacgcacgtcaatgtcagtgtggtcatggctgaagtggatggaacctgctatggatccggtcatcaccaccatcaccatcaccat

SEQ ID NO: 556 - DNA, 1020 bp, Artificial Sequence
  Description of Artificial Sequence: Synthetic polynucleotide
atggggtacaaaatgaacattagctcgcttcgcaaagcattcatttttatgggggctgttgcagctttaagccttgtcaatgcccagtcagcgcttgcccatggtgatggcagtttcagtgatgaaatgaacacgattttggataatttagcagccagggatttcataaactggttaattcaaactaaaataacggatggagggggtggttcgggcggcggtggcagtggaggcggtgggtctggcgggggtggtaccatctgtagccccccgactacgcccccaccgccttcgtgtcacccacgtctgtcactgcaccgtccagcattagaagacttactgctgggctccgaggcaaacctgacgtgtactttgacgggattgcgcgacgccagtggagtgacttttacgtggacgcctagcagcggcaaaagtgctgttcagggtccacccgagcgtgacttgtgcgggtgctactctgtgtcctcggtactgcccggctgcgcagagccctggaatcatggtaaaacgtttacctgtacagccgcctaccccgaaagtaaaactcctttgacagcaactctgagcaagtcgggtaatacatttcgtcccgaggttcatcttctgcctcccccttcggaagagcttgcattgaatgagctggtgacattaacctgtctggctcgtggttttagcccgaaagacgtacttgtccgttggctgcaagggagccaggaattgcctcgtgaaaagtatctgacttgggcaagccgccaagaacctagtcaggggacaacaaccttcgcggtaacaagcatcttacgtgttgcggctgaggactggaagaagggtgacacgttctcatgtatggtcggtcacgaggcgttaccacttgcgtttacacaaaagacgattgaccgccttgcgggtaagcctacgcacgtcaatgtcagtgtggtcatggctgaagtggatggaacctgctatggatccggtcatcaccaccatcaccatcaccat

SEQ ID NO: 557 - DNA, 987 bp, Artificial Sequence
  Description of Artificial Sequence: Synthetic polynucleotide
atggggtacaaaatgaacattagctcgcttcgcaaagcattcatttttatgggggctgttgcagctttaagccttgtcaatgcccagtcagcgcttgcccatggtgatggcagtttcagtgatgaaatgaacacgattttggataatttagcagccagggatttcataaactggttaattcaaactaaaataacggatggagggggtggttcgggcggcggtggcagtggaggcggtgggtctggcgggggtggtaccatctgtagccccccgactacgcccccaccgccttcgtgtcacccacgtctgtcactgcaccgtccagcattagaagacttactgctgggctccgaggcaaacctgacgtgtactttgacgggattgcgcgacgccagtggagtgacttttacgtggacgcctagcagcggcaaaagtgctgttcagggtccacccgagcgtgacttgtgcgggtgctactctgtgtcctcggtactgcccggctgcgcagagccctggaatcatggtaaaacgtttacctgtacagccgcctaccccgaaagtaaaactcctttgacagcaactctgagcaagtcgggtaatacatttcgtcccgaggttcatcttctgcctcccccttcggaagagcttgcattgaatgagctggtgacattaacctgtctggctcgtggttttagcccgaaagacgtacttgtccgttggctgcaagggagccaggaattgcctcgtgaaaagtatctgacttgggcaagccgccaagaacctagtcaggggacaacaaccttcgcggtaacaagcatcttacgtgttgcggctgaggactggaagaagggtgacacgttctcatgtatggtcggtcacgaggcgttaccacttgcgtttacacaaaagacgattgaccgccttgcgggcaagcctacgcacgtcaatgtcagtgtggtcatggctgaagtggatggaacctgctat

SEQ ID NO: 558 - DNA, 987 bp, Artificial Sequence
  Description of Artificial Sequence: Synthetic polynucleotide
atggggtacaaaatgaacattagctcgcttcgcaaagcattcatttttatgggggctgttgcagctttaagccttgtcaatgcccagtcagcgcttgcccatggtgatggcagtttcagtgatgaaatgaacacgattttggataatttagcagccagggatttcataaactggttaattcaaactaaaataacggatggagggggtggttcgggcggcggtggcagtggaggcggtgggtctggcgggggtggtaccatctgtagccccccgactacgcccccaccgccttcgtgtcacccacgtctgtcactgcaccgtccagcattagaagacttactgctgggctccgaggcaaacctgacgtgtactttgacgggattgcgcgacgccagtggagtgacttttacgtggacgcctagcagcggcaaaagtgctgttcagggtccacccgagcgtgacttgtgcgggtgctactctgtgtcctcggtactgcccggctgcgcagagccctggaatcatggtaaaacgtttacctgtacagccgcctaccccgaaagtaaaactcctttgacagcaactctgagcaagtcgggtaatacatttcgtcccgaggttcatcttctgcctcccccttcggaagagcttgcattgaatgagctggtgacattaacctgtctggctcgtggttttagcccgaaagacgtacttgtccgttggctgcaagggagccaggaattgcctcgtgaaaagtatctgacttgggcaagccgccaagaacctagtcaggggacaacaaccttcgcggtaacaagcatcttacgtgttgcggctgaggactggaagaagggtgacacgttctcatgtatggtcggtcacgaggcgttaccacttgcgtttacacaaaagacgattgaccgccttgcgggtaagcctacgcacgtcaatgtcagtgtggtcatggctgaagtggatggaacctgctat

SEQ ID NO: 559 - DNA, 888 bp, Artificial Sequence
  Description of Artificial Sequence: Synthetic polynucleotide
catggtgatggcagtttcagtgatgaaatgaacacgattttggataatttagcagccagggatttcataaactggttaattcaaactaaaataacggatggagggggtggttcgggcggcggtggcagtggaggcggtgggtctggcgggggtggtaccatctgtagccccccgactacgcccccaccgccttcgtgtcacccacgtctgtcactgcaccgtccagcattagaagacttactgctgggctccgaggcaaacctgacgtgtactttgacgggattgcgcgacgccagtggagtgacttttacgtggacgcctagcagcggcaaaagtgctgttcagggtccacccgagcgtgacttgtgcgggtgctactctgtgtcctcggtactgcccggctgcgcagagccctggaatcatggtaaaacgtttacctgtacagccgcctaccccgaaagtaaaactcctttgacagcaactctgagcaagtcgggtaatacatttcgtcccgaggttcatcttctgcctcccccttcggaagagcttgcattgaatgagctggtgacattaacctgtctggctcgtggttttagcccgaaagacgtacttgtccgttggctgcaagggagccaggaattgcctcgtgaaaagtatctgacttgggcaagccgccaagaacctagtcaggggacaacaaccttcgcggtaacaagcatcttacgtgttgcggctgaggactggaagaagggtgacacgttctcatgtatggtcggtcacgaggcgttaccacttgcgtttacacaaaagacgattgaccgccttgcgggcaagcctacgcacgtcaatgtcagtgtggtcatggctgaagtggatggaacctgctat

SEQ ID NO: 560 - DNA, 888 bp, Artificial Sequence
  Description of Artificial Sequence: Synthetic polynucleotide
catggtgatggcagtttcagtgatgaaatgaacacgattttggataatttagcagccagggatttcataaactggttaattcaaactaaaataacggatggagggggtggttcgggcggcggtggcagtggaggcggtgggtctggcgggggtggtaccatctgtagccccccgactacgcccccaccgccttcgtgtcacccacgtctgtcactgcaccgtccagcattagaagacttactgctgggctccgaggcaaacctgacgtgtactttgacgggattgcgcgacgccagtggagtgacttttacgtggacgcctagcagcggcaaaagtgctgttcagggtccacccgagcgtgacttgtgcgggtgctactctgtgtcctcggtactgcccggctgcgcagagccctggaatcatggtaaaacgtttacctgtacagccgcctaccccgaaagtaaaactcctttgacagcaactctgagcaagtcgggtaatacatttcgtcccgaggttcatcttctgcctcccccttcggaagagcttgcattgaatgagctggtgacattaacctgtctggctcgtggttttagcccgaaagacgtacttgtccgttggctgcaagggagccaggaattgcctcgtgaaaagtatctgacttgggcaagccgccaagaacctagtcaggggacaacaaccttcgcggtaacaagcatcttacgtgttgcggctgaggactggaagaagggtgacacgttctcatgtatggtcggtcacgaggcgttaccacttgcgtttacacaaaagacgattgaccgccttgcgggtaagcctacgcacgtcaatgtcagtgtggtcatggctgaagtggatggaacctgctat

SEQ ID NO: 561 - DNA, 159 bp, Artificial Sequence
  Description of Artificial Sequence: Synthetic polynucleotide
aaacaatcgaccatcgcattggcgctgcttcctctattgttcacaccggtgacaaaggcacatggtgatggcagtttcagtgatgaaatgaacacgattttggataatttagcagccagggatttcataaactggttaattcaaactaaaataacggat

SEQ ID NO: 562 - DNA, 198 bp, Artificial Sequence
  Description of Artificial Sequence: Synthetic polynucleotide
atggggtacaaaatgaacattagctcgcttcgcaaagcattcatttttatgggggctgttgcagctttaagccttgtcaatgcccagtcagcgcttgcccatggtgatggcagtttcagtgatgaaatgaacacgattttggataatttagcagccagggatttcataaactggttaattcaaactaaaataacggat

SEQ ID NO: 563 - protein, 181 aa, Artificial Sequence
  Description of Artificial Sequence: Synthetic polypeptide
MKQSTIALALLPLLFTPVTKASPGQGTQSENSCTHFPGNLPNMLRDLRDAFSRVKTFFQMKDQLDNLLLKESLLEDFKGYLGCQALSEMIQFYLEEVMPQAENQDPDIKAHVNSLGENLKTLRLRLRRCHRFLPCENKSKAVEQVKNAFNKLQEKGIYKAMSEFDIFINYIEAYMTMKIRN

SEQ ID NO: 564 - protein, 193 aa, Artificial Sequence
  Description of Artificial Sequence: Synthetic polypeptide
MGYKMNISSLRKAFIFMGAVAALSLVNAQSALASPGQGTQSENSCTHFPGNLPNMLRDLRDAFSRVKTFFQMKDQLDNLLLKESLLEDFKGYLGCQALSEMIQFYLEEVMPQAENQDPDIKAHVNSLGENLKTLRLRLRRCHRFLPCENKSKAVEQVKNAFNKLQEKGIYKAMSEFDIFINYIEAYMTMKIRN

SEQ ID NO: 565 - DNA, 543 bp, Artificial Sequence
  Description of Artificial Sequence: Synthetic polynucleotide
atgaaacaatcgaccatcgcattggcgctgcttcctctattgttcacaccggtgacaaaggcaagccccggacaaggcacccaatcagagaatagctgtacacatttccctggtaatcttcctaatatgctgcgtgacctgcgcgatgcgttcagtcgcgttaaaactttttttcaaatgaaagaccagttggataaccttttattaaaagaatcactgttagaggattttaaggggtatctgggatgccaggccctgtccgagatgattcaattttacctggaagaggtaatgccccaagctgagaaccaggacccggacatcaaggcgcacgttaactctttaggggagaatctgaaaaccttacgtctgcgtcttcgtcgctgccatcgcttccttccgtgcgaaaataaatcgaaagccgtggagcaagtcaaaaacgctttcaataagctgcaggagaagggaatttataaggctatgagtgagttcgatattttcattaactacattgaggcttatatgacaatgaagattcgcaat

SEQ ID NO: 566 - DNA, 579 bp, Artificial Sequence
  Description of Artificial Sequence: Synthetic polynucleotide
atggggtacaaaatgaacattagctcgcttcgcaaagcattcatttttatgggggctgttgcagctttaagccttgtcaatgcccagtcagcgcttgccagccccggacaaggcacccaatcagagaatagctgtacacatttccctggtaatcttcctaatatgctgcgtgacctgcgcgatgcgttcagtcgcgttaaaactttttttcaaatgaaagaccagttggataaccttttattaaaagaatcactgttagaggattttaaggggtatctgggatgccaggccctgtccgagatgattcaattttacctggaagaggtaatgccccaagctgagaaccaggacccggacatcaaggcgcacgttaactctttaggggagaatctgaaaaccttacgtctgcgtcttcgtcgctgccatcgcttccttccgtgcgaaaataaatcgaaagccgtggagcaagtcaaaaacgctttcaataagctgcaggagaagggaatttataaggctatgagtgagttcgatattttcattaactacattgaggcttatatgacaatgaagattcgcaat

SEQ ID NO: 567-764 - skipped (198 entries)

SEQ ID NO: 765 - protein, 242 aa, Artificial Sequence
  Description of Artificial Sequence: Synthetic polypeptide
MQVQLVESGGGVVQPGRSLRLSCAASGFTFSSYTMHWVRQAPGKGLEWVTFISYDGNNKYYADSVKGRFTISRDNSKNTLYLQMNSLRAEDTAIYYCARTGWLGPFDYWGQGTLVTVSSGGGSGGGSGGGSGGGEIVLTQSPGTLSLSPGERATLSCRASQSVGSSYLAWYQQKPGQAPRLLIYGAFSRATGIPDRFSGSGSGTDFTLTISRLEPEDFAVYYCQQYGSSPWTFGQGTKVEIK

SEQ ID NO: 766 - DNA, 1103 bp, Artificial Sequence
  Description of Artificial Sequence: Synthetic polynucleotide
agcgggaataaggggcagagaaaagagtatttcgtcgactaacaaaaaatggctgtttgtgaaaaaaattctaaaggttgttttacgacagacgataacagggttgacggcgattgagccgacgggtggaaacccaaaacgtaatcaacaaataaaaatgaggaggcaattctaatgcaagtgcaactggtagagtccggtgggggcgtggtgcagccgggtcgcagcctgcgtctgtcgtgcgcggcgagtggttttacgttttcgagttatactatgcactgggttcgtcaagcgccgggcaaaggcctggaatgggttactttcatttcttacgatggtaataataaatattatgcggattctgtgaaaggtcgctttactatttcgcgcgataacagtaaaaacactctgtatctgcaaatgaattctctgcgtgcagaggatactgctatctattactgcgcgcgtacgggctggttgggcccgtttgattattggggccaaggcactttggttactgtgtcatcgggcgggggctctggcggtggttcaggtggtggcagtggtggtggcgagatcgtgttgactcaatctccgggtactctgtctctgtctccgggtgaacgcgcgaccctgtcttgccgcgcttctcagagtgttggttcatcgtatctggcatggtatcaacagaaaccgggtcaagcgccgcgtctgctgatttacggtgcttttagtcgcgcaaccgggattccggatcgattttctggttcaggttctggcactgactttactttgactattagtcgtctggaaccggaggacttcgcggtttattattgccaacagtatggttcttctccgtggacctttggtcaaggcactaaagttgaaattaaataatcgccgtaacctgattaactgagactgacggcaacgccaaattgcctgatgcgctgcgcttatcaggcctacaaggggaattgcaatttattgaatttgcacatttttgtaggccggataaggcgtttacgccgcatccggcaacatgaatggtaatttgccagcaacgtgcttccccgccaacggcggggttttttctg

SEQ ID NO: 767 - protein, 242 aa, Artificial Sequence
  Description of Artificial Sequence: Synthetic polypeptide
MEIVLTQSPGTLSLSPGERATLSCRASQSVGSSYLAWYQQKPGQAPRLLIYGAFSRATGIPDRFSGSGSGTDFTLTISRLEPEDFAVYYCQQYGSSPWTFGQGTKVEIKGGGSGGGSGGGSGGGQVQLVESGGGVVQPGRSLRLSCAASGFTFSSYTMHWVRQAPGKGLEWVTFISYDGNNKYYADSVKGRFTISRDNSKNTLYLQMNSLRAEDTAIYYCARTGWLGPFDYWGQGTLVTVSS

SEQ ID NO: 768 - DNA, 1103 bp, Artificial Sequence
  Description of Artificial Sequence: Synthetic polynucleotide
agcgggaataaggggcagagaaaagagtatttcgtcgactaacaaaaaatggctgtttgtgaaaaaaattctaaaggttgttttacgacagacgataacagggttgacggcgattgagccgacgggtggaaacccaaaacgtaatcaacagattataaggagttaaatagaaaaatggagattgtactgacccagagccctggtacattgtctttgtcgcctggtgaacgcgcgactctgtcttgtcgtgcgtctcagtctgttggtagttcgtatctggcgtggtatcaacaaaaaccgggccaagctccgcgtctgctgatttacggtgcatttagccgcgcgactggcattccggaccgcttttctgggtctggctcaggtaccgattttactctgactatttcgcgtctggagccggaggatttcgcggtttattactgccagcaatatggttctagtccgtggaccttcggccaaggtactaaagtggaaatcaaaggcgggggttcgggtggtggctctgggggtggctcgggcggtgggcaggtgcaactggttgagagtggtggcggcgttgttcaaccgggccgctctctgcgcctgtcgtgcgctgcttctggctttacctttagctcttatacgatgcactgggttcgccaagctccgggtaaaggtctggagtgggtgactttcatttcttacgatggtaacaacaaatattatgctgattctgttaaaggccgttttactatttctcgagacaatagcaaaaacactctgtacctgcagatgaattctctgcgcgctgaagacaccgcgatttattattgtgcgcgcactggttggctgggtccgtttgattattggggtcagggcacgctggttactgttagctcgtgatcgccgtaacctgattaactgagactgacggcaacgccaaattgcctgatgcgctgcgcttatcaggcctacaaggggaattgcaatttattgaatttgcacatttttgtaggccggataaggcgtttacgccgcatccggcaacatgaatggtaatttgccagcaacgtgcttccccgccaacggcggggttttttctg

SEQ ID NO: 769 - protein, 236 aa, Artificial Sequence
  Description of Artificial Sequence: Synthetic polypeptide
MQVQLVESGGGVVQPGRSLRLDCKASGITFSNSGMHWVRQAPGKGLEWVAVIWYDGSKRYYADSVKGRFTISRDNSKNTLFLQMNSLRAEDTAVYYCATNDDYWGQGTLVTVSSGGGSGGGSGGGSGGGEIVLTQSPATLSLSPGERATLSCRASQSVSSYLAWYQQKPGQAPRLLIYDASNRATGIPARFSGSGSGTDFTLTISSLEPEDFAVYYCQQSSNWPRTFGQGTKVEIK

SEQ ID NO: 770 - DNA, 1095 bp, Artificial Sequence
  Description of Artificial Sequence: Synthetic polynucleotide
agcgggaataaggggcagagaaaagagtatttcgtcgactaacaaaaaatggctgtttgtgaaaaaaattctaaaggttgttttacgacagacgataacagggttgacggcgattgagccgacgggtggaaacccaaaacgtaatcaacctcaaagaattataggaaaggaggaagcgataagtatgcaggtgcaattggtggagtcgggtggcggcgtggtgcaaccgggtcgtagcctgcgcctggattgtaaagcgtcaggcatcacgtttagcaattctggcatgcactgggtgcgtcaagcgccgggcaaaggtctggagtgggttgcggtaatttggtacgatggttctaaacgctattacgcggatagtgtgaaaggtcgctttactatctctcgcgataattctaaaaacaccctgtttctgcaaatgaattcgttgcgtgcggaagatactgcggtatattattgtgctactaacgatgattattggggtcaaggcaccctggtgactgtttcgagcggcggtggtagcggcggcggctctggtggtggttctggtggcggtgagattgtgctgactcaaagcccggcgaccctgtctctgtcgccgggtgaacgcgctactctgagttgccgtgcgtcgcaaagcgtgtcttcttatctggcgtggtaccaacaaaaaccgggtcaagcgccgcgcctgctgatatatgatgctagtaatcgtgcaacgggtattccggcacgcttttcaggttctggcagcggcaccgatttcactctgactatctcgtcactggagccggaagactttgcggtttattattgtcagcaatcttctaattggccgcgtacgtttggtcagggcactaaagttgaaatcaaataatcgccgtaacctgattaactgagactgacggcaacgccaaattgcctgatgcgctgcgcttatcaggcctacaaggggaattgcaatttattgaatttgcacatttttgtaggccggataaggcgtttacgccgcatccggcaacatgaatggtaatttgccagcaacgtgcttccccgccaacggcggggttttttctg

SEQ ID NO: 771 - protein, 236 aa, Artificial Sequence
  Description of Artificial Sequence: Synthetic polypeptide
MEIVLTQSPATLSLSPGERATLSCRASQSVSSYLAWYQQKPGQAPRLLIYDASNRATGIPARFSGSGSGTDFTLTISSLEPEDFAVYYCQQSSNWPRTFGQGTKVEIKGGGSGGGSGGGSGGGQVQLVESGGGVVQPGRSLRLDCKASGITFSNSGMHWVRQAPGKGLEWVAVIWYDGSKRYYADSVKGRFTISRDNSKNTLFLQMNSLRAEDTAVYYCATNDDYWGQGTLVTVSS

SEQ ID NO: 772 - DNA, 1085 bp, Artificial Sequence
  Description of Artificial Sequence: Synthetic polynucleotide
agcgggaataaggggcagagaaaagagtatttcgtcgactaacaaaaaatggctgtttgtgaaaaaaattctaaaggttgttttacgacagacgataacagggttgacggcgattgagccgacgggtggaaacccaaaacgtaatcaacatcaccaatttgaggaaaggtaaatatggaaatcgttttaacgcagtcgccggcgactctgtctttgtcgcctggtgaacgtgctacgctgtcttgccgcgcgtcacagtctgtgtcgtcatatctggcttggtaccaacagaaaccgggccaagctccgcgcctgctgatttatgatgcgtctaatcgcgcgaccggcattccggcgcgtttttctggctccggctctggcaccgactttactctgactatttcgtctctggaaccggaagattttgcggtgtactattgccagcaatcttctaattggccgcgcacgtttggtcaaggtaccaaggttgagatcaaaggtggtggctcgggcggcggttcgggcggcggctcaggtggtggccaagttcagttggttgagtctggcgggggcgtagtacaaccgggtcgttctttgcgtctggattgcaaagcgagcggtattacctttagcaattcaggtatgcactgggtgcgccaagcgccgggcaaaggcctggaatgggttgcggtgatttggtacgatggctcgaaacgttattatgctgacagcgttaaaggtcgttttactattagccgtgataattccaaaaatacgctgtttctgcagatgaatagcctgcgtgctgaagacactgcggtttattactgtgctactaatgatgattactggggccagggcaccctggtgactgtgagttcttaatcgccgtaacctgattaactgagactgacggcaacgccaaattgcctgatgcgctgcgcttatcaggcctacaaggggaattgcaatttattgaatttgcacatttttgtaggccggataaggcgtttacgccgcatccggcaacatgaatggtaatttgccagcaacgtgcttccccgccaacggcggggttttttctg

SEQ ID NO: 773 - protein, 242 aa, Artificial Sequence
  Description of Artificial Sequence: Synthetic polypeptide
MEVQLVESGGGLVQPGGSLRLSCAASGFTFSDSWIHWVRQAPGKGLEWVAWISPYGGSTYYADSVKGRFTISADTSKNTAYLQMNSLRAEDTAVYYCARRHWPGGFDYWGQGTLVTVSSGGGSGGGSGGGSGGGDIQMTQSPSSLSASVGDRVTITCRASQDVSTAVAWYQQKPGKAPKLLIYSASFLYSGVPSRFSGSGSGTDFTLTISSLQPEDFATYYCQQYLYHPATFGQGTKVEIKR

SEQ ID NO: 774 - DNA, 1103 bp, Artificial Sequence
  Description of Artificial Sequence: Synthetic polynucleotide
agcgggaataaggggcagagaaaagagtatttcgtcgactaacaaaaaatggctgtttgtgaaaaaaattctaaaggttgttttacgacagacgataacagggttgacggcgattgagccgacgggtggaaacccaaaacgtaatcaactacataattttggggagggtactcgatggaagttcagctggtggagagtggtggcggtctggtgcagccgggcggctctctgcgtctgagctgtgcggcgtctggctttacgttttctgacagttggattcactgggtgcgccaagcaccgggcaaaggcctggagtgggtggcgtggatttctccgtatggcggtagtacttattatgctgattctgtgaaaggccgttttaccatttcggcggacacttcaaaaaataccgcgtatctgcaaatgaatagcctgcgcgctgaagacacggctgtttactactgtgctcgccgccactggccgggcggtttcgattattggggccaaggcactctggtgactgtgagctctggcggcgggtcgggtggcggttctggcggtggcagtggcggtggtgatattcaaatgacccaatctccgtcgtctctgagcgcgtctgtgggcgatcgtgtaaccattacttgtcgtgcgtcgcaggatgtgtctactgctgtggcgtggtatcagcaaaaaccgggtaaagctccgaaactgctgatttatagcgcttcttttctgtatagtggtgttccgtcacgttttagcggttcaggctctggtactgatttcacactgactatttcttctctgcaaccggaagatttcgcgacttattattgtcagcagtacttgtaccacccggcaacttttggtcagggcactaaagttgaaattaaacgttaatcgccgtaacctgattaactgagactgacggcaacgccaaattgcctgatgcgctgcgcttatcaggcctacaaggggaattgcaatttattgaatttgcacatttttgtaggccggataaggcgtttacgccgcatccggcaacatgaatggtaatttgccagcaacgtgcttccccgccaacggcggggttttttctg

SEQ ID NO: 775 - protein, 242 aa, Artificial Sequence
  Description of Artificial Sequence: Synthetic polypeptide
MDIQMTQSPSSLSASVGDRVTITCRASQDVSTAVAWYQQKPGKAPKLLIYSASFLYSGVPSRFSGSGSGTDFTLTISSLQPEDFATYYCQQYLYHPATFGQGTKVEIKRGGGSGGGSGGGSGGGEVQLVESGGGLVQPGGSLRLSCAASGFTFSDSWIHWVRQAPGKGLEWVAWISPYGGSTYYADSVKGRFTISADTSKNTAYLQMNSLRAEDTAVYYCARRHWPGGFDYWGQGTLVTVSS

SEQ ID NO: 776 - DNA, 1103 bp, Artificial Sequence
  Description of Artificial Sequence: Synthetic polynucleotide
agcgggaataaggggcagagaaaagagtatttcgtcgactaacaaaaaatggctgtttgtgaaaaaaattctaaaggttgttttacgacagacgataacagggttgacggcgattgagccgacgggtggaaacccaaaacgtaatcaactggcagacgcctaaggaggaagaccatggatattcagatgactcagagccctagctcactgtctgcgtcagttggcgatcgtgtgactattacctgtcgcgctagtcaggatgtgtctacggcggttgcgtggtatcaacagaaaccgggcaaagctccgaaactgttgatttattcagcgtctttcctgtattcgggtgtgccttctcgcttttcgggctctggtagcggtactgattttacgctgactattagttcactgcaaccggaggactttgcgacttattattgccaacaatacctgtatcacccggcgacctttggtcaaggcactaaagtggaaattaaacgcggcggcggcagcggtggcggctctggtggtgggtctggtggtggtgaggttcagctggttgagtctggtggtggtctggttcaacctgggggcagcctgcgcctgtcgtgcgcggcgtctggttttacgttctcagattcttggattcactgggtacgtcaagctccgggcaaaggtctggagtgggtggcgtggatttctccgtatggcggttcgacgtattacgcggactctgttaaagggcgttttacgatctcagcggatacttctaaaaatactgcgtatctgcaaatgaattctctgcgagcggaggataccgcggtgtattactgtgctcgccgccactggcctggtggtttcgattattggggtcaaggtaccctggtgactgtttcgtcttaatcgccgtaacctgattaactgagactgacggcaacgccaaattgcctgatgcgctgcgcttatcaggcctacaaggggaattgcaatttattgaatttgcacatttttgtaggccggataaggcgtttacgccgcatccggcaacatgaatggtaatttgccagcaacgtgcttccccgccaacggcggggttttttctg

SEQ ID NO: 777 - protein, 606 aa, Artificial Sequence
  Description of Artificial Sequence: Synthetic polypeptide
MNKVYSLKYCPVTGGLIVVSELASRVIKKTCRRLTHILLAGIPAVYLYYPQISQAGIVRQVQLVESGGGVVQPGRSLRLSCAASGFTFSSYTMHWVRQAPGKGLEWVTFISYDGNNKYYADSVKGRFTISRDNSKNTLYLQMNSLRAEDTAIYYCARTGWLGPFDYWGQGTLVTVSSGGGSGGGSGGGSGGGEIVLTQSPGTLSLSPGERATLSCRASQSVGSSYLAWYQQKPGQAPRLLIYGAFSRATGIPDRFSGSGSGTDFTLTISRLEPEDFAVYYCQQYGSSPWTFGQGTKVEIKFKAEADKAAAAKADSFMNAGYKNFMTEVNNLNKRMGDLRDTNGDAGAWARIMSGAGSADGGYSDNYTHVQVGFDKKHELDGVDLFTGVTMTYTDSSADSHAFSGKTKSVGGGLYASALFESGAYIDLIGKYIHHDNDYTGNFAGLGTKHYNTHSWYAGAETGYRYHLTEETFIEPQAELVYGAVSGKTFRWKDGDMDLSMKNRDFSPLIGRTGIELGKTFSGKDWSVTARAGTSWQFDLLNNGETVLRDASGEKRIKGEKDSRMLFNVGMNAQIKDNMRFGLEFEKSAFGKYNVDNAVNANFRYMF

SEQ ID NO: 778 - DNA, 2038 bp, Artificial Sequence
  Description of Artificial Sequence: Synthetic polynucleotide
atctaatctagacatcattaattcctaatttttgttgacactctatcattgatagagttattttaccactccctatcagtgatagagaaaagtgaattaaatatcaactagaggtcaccaaatgaacaaagtatatagcctgaaatattgcccagtaactgggggtctgattgtagtcagtgaactggcatcccgcgtcatcaaaaaaacctgccgtcgtctgactcacatcctgctggcgggtattccggctgtgtatctgtactacccgcagatctcccaggcaggtatcgtccgccaggtacaattagttgagagcggcggcggtgtggttcaaccgggccgtagtctgcgattgtcttgtgctgcatctggttttactttcagttcttacacgatgcactgggttcgccaagctccgggcaaaggcctggagtgggttacctttatttcttacgatggcaataataagtattacgctgattctgtgaaaggtcgctttactattagccgagataactctaaaaatactctgtatctgcaaatgaattctctgcgtgcggaagatactgcgatctattattgtgcgcgtactggttggctgggcccgtttgattattggggccaaggcacgctggttactgttagttcgggcggcggttctggtggcggctctggtggtggctctggcggcggcgagattgtgctgactcaatctccgggcacgctgtcactgtctccgggtgaacgcgcgaccctgtcttgtcgcgcgagtcaaagtgttggttcttcttatctggcttggtatcagcaaaagcctggtcaagcgccgcgtctgttgatttatggcgcgttttcgcgcgcgactggcattccggaccgattttctggttctggttctggcactgatttcactctgaccatttcacgcctggaaccggaggattttgcggtgtactattgccaacaatatggctcatcgccgtggacgtttggccaaggtactaaagttgagattaaattcaaagcggaggctgacaaggccgctgcagcaaaagctgactcctttatgaacgcgggttacaaaaacttcatgaccgaggtaaataatctcaataaacgtatgggtgatctgcgcgacactaatggggatgcaggcgcatgggcacgcattatgtctggtgcaggttcggcggatggcgggtattctgacaattacactcatgttcaggtgggcttcgataaaaaacatgagctggacggtgtggatctgttcactggcgtaaccatgacttatactgattcaagcgcagacagccacgcattttcaggtaaaacgaaatcagttggcggcggtctgtatgcgagcgcactgttcgagagcggcgcctacattgatctaattggcaagtatattcaccatgataatgattacacagggaactttgcaggcctgggcaccaaacactataacacgcattcatggtacgctggcgcagaaaccggctatagataccacctgaccgaggaaacctttatcgaaccgcaagcggaactggtttacggtgcggtcagtggcaagacctttcgttggaaagatggtgatatggatctgtcaatgaaaaaccgcgacttcagccccttgatcggccgcaccggcattgagctgggcaaaaccttctctggcaaagattggtctgttaccgcgcgtgcgggcacttcgtggcaatttgatctgctaaacaacggtgagactgtactgcgtgatgcgagtggcgaaaaacgtattaaaggtgaaaaagatagtagaatgctattcaacgtgggcatgaatgcgcagatcaaagataacatgcgttttgggttggagtttgaaaaatccgcgttcggtaaatataatgttgacaatgctgtgaacgcgaatttccgctacatgttttaactctaacggacttgagtgaggttgtaaagggagttggctcctcggtaccaaattccagaaaagaggcctcccgaaaggggggccttttttcgtttt

SEQ ID NO: 779 - protein, 606 aa, Artificial Sequence
  Description of Artificial Sequence: Synthetic polypeptide
MNKVYSLKYCPVTGGLIVVSELASRVIKKTCRRLTHILLAGIPAVYLYYPQISQAGIVREIVLTQSPGTLSLSPGERATLSCRASQSVGSSYLAWYQQKPGQAPRLLIYGAFSRATGIPDRFSGSGSGTDFTLTISRLEPEDFAVYYCQQYGSSPWTFGQGTKVEIKGGGSGGGSGGGSGGGQVQLVESGGGVVQPGRSLRLSCAASGFTFSSYTMHWVRQAPGKGLEWVTFISYDGNNKYYADSVKGRFTISRDNSKNTLYLQMNSLRAEDTAIYYCARTGWLGPFDYWGQGTLVTVSSFKAEADKAAAAKADSFMNAGYKNFMTEVNNLNKRMGDLRDTNGDAGAWARIMSGAGSADGGYSDNYTHVQVGFDKKHELDGVDLFTGVTMTYTDSSADSHAFSGKTKSVGGGLYASALFESGAYIDLIGKYIHHDNDYTGNFAGLGTKHYNTHSWYAGAETGYRYHLTEETFIEPQAELVYGAVSGKTFRWKDGDMDLSMKNRDFSPLIGRTGIELGKTFSGKDWSVTARAGTSWQFDLLNNGETVLRDASGEKRIKGEKDSRMLFNVGMNAQIKDNMRFGLEFEKSAFGKYNVDNAVNANFRYMF

SEQ ID NO: 780 - DNA, 2038 bp, Artificial Sequence
  Description of Artificial Sequence: Synthetic polynucleotide
atctaatctagacatcattaattcctaatttttgttgacactctatcattgatagagttattttaccactccctatcagtgatagagaaaagtgaattaaatatcaactagaggtcaccaaatgaacaaagtatatagcctgaaatattgcccagtaactgggggtctgattgtagtcagtgaactggcatcccgcgtcatcaaaaaaacctgccgtcgtctgactcacatcctgctggcgggtattccggctgtgtatctgtactacccgcagatctcccaggcaggtatcgtccgcgaaattgtactgacccagtcgcctggtaccctgtctctgtcgccgggtgaacgtgctaccctgtcttgtcgtgcttcgcaatcggttggctcgtcttatctggcatggtatcagcaaaaaccgggccaagcgcctcgtctgctgatttatggcgcgttttctcgtgctacgggcattcctgatcgtttttcgggctctggctctggtactgattttacgctgactatcagccgcttggaacctgaagattttgcggtttattattgccaacaatatggctcttctccgtggacgtttggtcaaggcactaaagttgaaattaaaggtggtggctcgggcggtggttctggtggtggtagtggtggtggtcaagtgcagttggttgaatcgggtggcggtgttgtgcagccgggccgttcgttgcgtctgtcttgcgcagcgagtggtttcaccttctcttcttatactatgcactgggtgcgtcaagcacctggcaaaggtctggagtgggtaacttttatttcatacgatggtaataataaatattatgcagattctgttaaaggtcgctttacgatttctcgcgataattcaaaaaatacgctgtatctgcagatgaattcgctgcgcgctgaggatactgcgatctactattgtgcgcgtactggttggctgggtccgtttgattactggggccaaggtacgctggttacagtttcgtcgttcaaagcggaggctgacaaggccgctgcagcaaaagctgactcctttatgaacgcgggttacaaaaacttcatgaccgaggtaaataatctcaataaacgtatgggtgatctgcgcgacactaatggggatgcaggcgcatgggcacgcattatgtctggtgcaggttcggcggatggcgggtattctgacaattacactcatgttcaggtgggcttcgataaaaaacatgagctggacggtgtggatctgttcactggcgtaaccatgacttatactgattcaagcgcagacagccacgcattttcaggtaaaacgaaatcagttggcggcggtctgtatgcgagcgcactgttcgagagcggcgcctacattgatctaattggcaagtatattcaccatgataatgattacacagggaactttgcaggcctgggcaccaaacactataacacgcattcatggtacgctggcgcagaaaccggctatagataccacctgaccgaggaaacctttatcgaaccgcaagcggaactggtttacggtgcggtcagtggcaagacctttcgttggaaagatggtgatatggatctgtcaatgaaaaaccgcgacttcagccccttgatcggccgcaccggcattgagctgggcaaaaccttctctggcaaagattggtctgttaccgcgcgtgcgggcacttcgtggcaatttgatctgctaaacaacggtgagactgtactgcgtgatgcgagtggcgaaaaacgtattaaaggtgaaaaagatagtagaatgctattcaacgtgggcatgaatgcgcagatcaaagataacatgcgttttgggttggagtttgaaaaatccgcgttcggtaaatataatgttgacaatgctgtgaacgcgaatttccgctacatgttttaactctaacggacttgagtgaggttgtaaagggagttggctcctcggtaccaaattccagaaaagaggcctcccgaaaggggggccttttttcgtttt

SEQ ID NO: 781 - protein, 600 aa, Artificial Sequence
  Description of Artificial Sequence: Synthetic polypeptide
MNKVYSLKYCPVTGGLIVVSELASRVIKKTCRRLTHILLAGIPAVYLYYPQISQAGIVRQVQLVESGGGVVQPGRSLRLDCKASGITFSNSGMHWVRQAPGKGLEWVAVIWYDGSKRYYADSVKGRFTISRDNSKNTLFLQMNSLRAEDTAVYYCATNDDYWGQGTLVTVSSGGGSGGGSGGGSGGGEIVLTQSPATLSLSPGERATLSCRASQSVSSYLAWYQQKPGQAPRLLIYDASNRATGIPARFSGSGSGTDFTLTISSLEPEDFAVYYCQQSSNWPRTFGQGTKVEIKFKAEADKAAAAKADSFMNAGYKNFMTEVNNLNKRMGDLRDTNGDAGAWARIMSGAGSADGGYSDNYTHVQVGFDKKHELDGVDLFTGVTMTYTDSSADSHAFSGKTKSVGGGLYASALFESGAYIDLIGKYIHHDNDYTGNFAGLGTKHYNTHSWYAGAETGYRYHLTEETFIEPQAELVYGAVSGKTFRWKDGDMDLSMKNRDFSPLIGRTGIELGKTFSGKDWSVTARAGTSWQFDLLNNGETVLRDASGEKRIKGEKDSRMLFNVGMNAQIKDNMRFGLEFEKSAFGKYNVDNAVNANFRYMF

SEQ ID NO: 782 - DNA, 2020 bp, Artificial Sequence
  Description of Artificial Sequence: Synthetic polynucleotide
atctaatctagacatcattaattcctaatttttgttgacactctatcattgatagagttattttaccactccctatcagtgatagagaaaagtgaattaaatatcaactagaggtcaccaaatgaacaaagtatatagcctgaaatattgcccagtaactgggggtctgattgtagtcagtgaactggcatcccgcgtcatcaaaaaaacctgccgtcgtctgactcacatcctgctggcgggtattccggctgtgtatctgtactacccgcagatctcccaggcaggtatcgtccgccaagtacaactggttgaatccggcggaggagtggtgcaaccgggccgcagtttgcgtctggattgtaaagcttcaggcatcactttttctaattctggtatgcactgggttcgccaagctccgggtaaaggtctggagtgggttgcggtgatctggtatgatggttctaaacgatattatgcggatagtgttaagggtcgttttactatttctcgtgataattctaagaacaccttgtttctgcagatgaatagtctgcgcgctgaggatactgcggtatattattgtgcgactaatgacgattattggggccaaggcacgctggttaccgtgagctctggtggtggttcgggtggtggttctggtggtgggagcggcggtggcgagatcgttctgactcaaagcccggcgactctgagtctgagtccgggtgaacgtgcgactctgagctgccgtgcgtctcagagtgtgtcgagttatctggcgtggtaccaacaaaaaccgggccaggcgccgcgactgctgatttatgatgcttctaatcgtgcgactggtattccggcgcgctttagcggttctggctcaggcactgacttcactctgactatttcttcgctggaaccggaagattttgcggtgtactattgtcaacaatcatctaattggcctcgtacgttcggtcaaggtacaaaagtggagataaaattcaaagcggaggctgacaaggccgctgcagcaaaagctgactcctttatgaacgcgggttacaaaaacttcatgaccgaggtaaataatctcaataaacgtatgggtgatctgcgcgacactaatggggatgcaggcgcatgggcacgcattatgtctggtgcaggttcggcggatggcgggtattctgacaattacactcatgttcaggtgggcttcgataaaaaacatgagctggacggtgtggatctgttcactggcgtaaccatgacttatactgattcaagcgcagacagccacgcattttcaggtaaaacgaaatcagttggcggcggtctgtatgcgagcgcactgttcgagagcggcgcctacattgatctaattggcaagtatattcaccatgataatgattacacagggaactttgcaggcctgggcaccaaacactataacacgcattcatggtacgctggcgcagaaaccggctatagataccacctgaccgaggaaacctttatcgaaccgcaagcggaactggtttacggtgcggtcagtggcaagacctttcgttggaaagatggtgatatggatctgtcaatgaaaaaccgcgacttcagccccttgatcggccgcaccggcattgagctgggcaaaaccttctctggcaaagattggtctgttaccgcgcgtgcgggcacttcgtggcaatttgatctgctaaacaacggtgagactgtactgcgtgatgcgagtggcgaaaaacgtattaaaggtgaaaaagatagtagaatgctattcaacgtgggcatgaatgcgcagatcaaagataacatgcgttttgggttggagtttgaaaaatccgcgttcggtaaatataatgttgacaatgctgtgaacgcgaatttccgctacatgttttaactctaacggacttgagtgaggttgtaaagggagttggctcctcggtaccaaattccagaaaagaggcctcccgaaaggggggccttttttcgtttt

SEQ ID NO: 783 - protein, 600 aa, Artificial Sequence
  Description of Artificial Sequence: Synthetic polypeptide
MNKVYSLKYCPVTGGLIVVSELASRVIKKTCRRLTHILLAGIPAVYLYYPQISQAGIVREIVLTQSPATLSLSPGERATLSCRASQSVSSYLAWYQQKPGQAPRLLIYDASNRATGIPARFSGSGSGTDFTLTISSLEPEDFAVYYCQQSSNWPRTFGQGTKVEIKGGGSGGGSGGGSGGGQVQLVESGGGVVQPGRSLRLDCKASGITFSNSGMHWVRQAPGKGLEWVAVIWYDGSKRYYADSVKGRFTISRDNSKNTLFLQMNSLRAEDTAVYYCATNDDYWGQGTLVTVSSFKAEADKAAAAKADSFMNAGYKNFMTEVNNLNKRMGDLRDTNGDAGAWARIMSGAGSADGGYSDNYTHVQVGFDKKHELDGVDLFTGVTMTYTDSSADSHAFSGKTKSVGGGLYASALFESGAYIDLIGKYIHHDNDYTGNFAGLGTKHYNTHSWYAGAETGYRYHLTEETFIEPQAELVYGAVSGKTFRWKDGDMDLSMKNRDFSPLIGRTGIELGKTFSGKDWSVTARAGTSWQFDLLNNGETVLRDASGEKRIKGEKDSRMLFNVGMNAQIKDNMRFGLEFEKSAFGKYNVDNAVNANFRYMF

SEQ ID NO: 784 - DNA, 2020 bp, Artificial Sequence
  Description of Artificial Sequence: Synthetic polynucleotide
atctaatctagacatcattaattcctaatttttgttgacactctatcattgatagagttattttaccactccctatcagtgatagagaaaagtgaattaaatatcaactagaggtcaccaaatgaacaaagtatatagcctgaaatattgcccagtaactgggggtctgattgtagtcagtgaactggcatcccgcgtcatcaaaaaaacctgccgtcgtctgactcacatcctgctggcgggtattccggctgtgtatctgtactacccgcagatctcccaggcaggtatcgtccgcgaaatcgtgctgactcagagtccggcgactctgtctctgagtccgggcgaacgcgcgactctgtcttgccgtgcgtctcaatctgtgtcttcatacttggcttggtaccaacaaaaaccgggccaggcgccgcgactgttgatttatgatgcgtcgaatcgcgcgactggcattccggcgcgcttttcgggtagcggttctggtactgattttacgctgactatctcttctctggagcctgaagatttcgctgtttattactgccaacagtctagtaattggccgcgtactttcggccagggcactaaggtggaaattaaaggtggcggctcgggcggcggctcgggtggtggttctggtggtggccaagtgcaactggtggaaagtggcggcggggtggtgcaaccgggccgttctctgcgcctggattgtaaagcttcaggcattacttttagcaactctggtatgcactgggttcgccaagctccgggcaaaggcctggaatgggtggcggttatttggtacgatggctctaaacgttattacgctgacagtgttaaaggccgctttaccatttctcgtgataattctaaaaataccctgtttctgcaaatgaactcgctgcgcgcggaagatactgctgtttactattgtgcgactaatgatgattactggggtcaaggtaccctggttaccgtgtcttctttcaaagcggaggctgacaaggccgctgcagcaaaagctgactcctttatgaacgcgggttacaaaaacttcatgaccgaggtaaataatctcaataaacgtatgggtgatctgcgcgacactaatggggatgcaggcgcatgggcacgcattatgtctggtgcaggttcggcggatggcgggtattctgacaattacactcatgttcaggtgggcttcgataaaaaacatgagctggacggtgtggatctgttcactggcgtaaccatgacttatactgattcaagcgcagacagccacgcattttcaggtaaaacgaaatcagttggcggcggtctgtatgcgagcgcactgttcgagagcggcgcctacattgatctaattggcaagtatattcaccatgataatgattacacagggaactttgcaggcctgggcaccaaacactataacacgcattcatggtacgctggcgcagaaaccggctatagataccacctgaccgaggaaacctttatcgaaccgcaagcggaactggtttacggtgcggtcagtggcaagacctttcgttggaaagatggtgatatggatctgtcaatgaaaaaccgcgacttcagccccttgatcggccgcaccggcattgagctgggcaaaaccttctctggcaaagattggtctgttaccgcgcgtgcgggcacttcgtggcaatttgatctgctaaacaacggtgagactgtactgcgtgatgcgagtggcgaaaaacgtattaaaggtgaaaaagatagtagaatgctattcaacgtgggcatgaatgcgcagatcaaagataacatgcgttttgggttggagtttgaaaaatccgcgttcggtaaatataatgttgacaatgctgtgaacgcgaatttccgctacatgttttaactctaacggacttgagtgaggttgtaaagggagttggctcctcggtaccaaattccagaaaagaggcctcccgaaaggggggccttttttcgtttt

SEQ ID NO: 785 - protein, 606 aa, Artificial Sequence
  Description of Artificial Sequence: Synthetic polypeptide
MNKVYSLKYCPVTGGLIVVSELASRVIKKTCRRLTHILLAGIPAVYLYYPQISQAGIVRDIQMTQSPSSLSASVGDRVTITCRASQDVSTAVAWYQQKPGKAPKLLIYSASFLYSGVPSRFSGSGSGTDFTLTISSLQPEDFATYYCQQYLYHPATFGQGTKVEIKRGGGSGGGSGGGSGGGEVQLVESGGGLVQPGGSLRLSCAASGFTFSDSWIHWVRQAPGKGLEWVAWISPYGGSTYYADSVKGRFTISADTSKNTAYLQMNSLRAEDTAVYYCARRHWPGGFDYWGQGTLVTVSSFKAEADKAAAAKADSFMNAGYKNFMTEVNNLNKRMGDLRDTNGDAGAWARIMSGAGSADGGYSDNYTHVQVGFDKKHELDGVDLFTGVTMTYTDSSADSHAFSGKTKSVGGGLYASALFESGAYIDLIGKYIHHDNDYTGNFAGLGTKHYNTHSWYAGAETGYRYHLTEETFIEPQAELVYGAVSGKTFRWKDGDMDLSMKNRDFSPLIGRTGIELGKTFSGKDWSVTARAGTSWQFDLLNNGETVLRDASGEKRIKGEKDSRMLFNVGMNAQIKDNMRFGLEFEKSAFGKYNVDNAVNANFRYMF

SEQ ID NO: 786 - DNA, 2038 bp, Artificial Sequence
  Description of Artificial Sequence: Synthetic polynucleotide
atctaatctagacatcattaattcctaatttttgttgacactctatcattgatagagttattttaccactccctatcagtgatagagaaaagtgaattaaatatcaactagaggtcaccaaatgaacaaagtatatagcctgaaatattgcccagtaactgggggtctgattgtagtcagtgaactggcatcccgcgtcatcaaaaaaacctgccgtcgtctgactcacatcctgctggcgggtattccggctgtgtatctgtactacccgcagatctcccaggcaggtatcgtccgcgaagtgcagctggtggagtcaggtggaggcttggtgcaaccgggcggttcactgcgtctgtcatgtgcggcgtctgggtttacttttagtgactcttggattcactgggtgcgccaggctccgggtaaaggcctggaatgggtagcttggattagtccttacggtggctcgacctattatgctgattcggtaaagggtcgctttactattagcgctgatacttctaaaaatactgcatacctgcagatgaatagcctgcgcgctgaggatactgctgtgtattattgcgcgcgtcgccactggccgggcggctttgattattggggccaaggtactctggttaccgtgtctagtggcggtggtagcggcggcggctcaggtggcggctcgggcggtggcgacattcagatgactcagtctccgtcttctttgtcggcgagcgtgggcgatcgtgttaccatcacgtgtcgcgcgagccaagatgtgtcgactgcggtggcttggtatcaacaaaaaccgggtaaagctccgaaactgctgatttatagtgcgtcttttttgtattctggtgttccgtctcgtttctctggctcaggtagcggtactgattttacgctgactatttcttcactgcaaccggaagattttgctacgtattattgtcaacaatatctgtatcacccggcgacgtttggtcagggtactaaggtggagataaaacgcttcaaagcggaggctgacaaggccgctgcagcaaaagctgactcctttatgaacgcgggttacaaaaacttcatgaccgaggtaaataatctcaataaacgtatgggtgatctgcgcgacactaatggggatgcaggcgcatgggcacgcattatgtctggtgcaggttcggcggatggcgggtattctgacaattacactcatgttcaggtgggcttcgataaaaaacatgagctggacggtgtggatctgttcactggcgtaaccatgacttatactgattcaagcgcagacagccacgcattttcaggtaaaacgaaatcagttggcggcggtctgtatgcgagcgcactgttcgagagcggcgcctacattgatctaattggcaagtatattcaccatgataatgattacacagggaactttgcaggcctgggcaccaaacactataacacgcattcatggtacgctggcgcagaaaccggctatagataccacctgaccgaggaaacctttatcgaaccgcaagcggaactggtttacggtgcggtcagtggcaagacctttcgttggaaagatggtgatatggatctgtcaatgaaaaaccgcgacttcagccccttgatcggccgcaccggcattgagctgggcaaaaccttctctggcaaagattggtctgttaccgcgcgtgcgggcacttcgtggcaatttgatctgctaaacaacggtgagactgtactgcgtgatgcgagtggcgaaaaacgtattaaaggtgaaaaagatagtagaatgctattcaacgtgggcatgaatgcgcagatcaaagataacatgcgttttgggttggagtttgaaaaatccgcgttcggtaaatataatgttgacaatgctgtgaacgcgaatttccgctacatgttttaactctaacggacttgagtgaggttgtaaagggagttggctcctcggtaccaaattccagaaaagaggcctcccgaaaggggggccttttttcgtttt

SEQ ID NO: 787 - protein, 600 aa, Artificial Sequence; identical to SEQ ID NO: 783
  Description of Artificial Sequence: Synthetic polypeptide

SEQ ID NO: 788 - DNA, 2038 bp, Artificial Sequence
  Description of Artificial Sequence: Synthetic polynucleotide
atctaatctagacatcattaattcctaatttttgttgacactctatcattgatagagttattttaccactccctatcagtgatagagaaaagtgaattaaatatcaactagaggtcaccaaatgaacaaagtatatagcctgaaatattgcccagtaactgggggtctgattgtagtcagtgaactggcatcccgcgtcatcaaaaaaacctgccgtcgtctgactcacatcctgctggcgggtattccggctgtgtatctgtactacccgcagatctcccaggcaggtatcgtccgcgatattcaaatgactcaatctccgagctctctgagtgcgtctgtgggtgatcgtgtgactattacttgtcgtgcgtctcaagatgtttcaactgcggttgcgtggtatcaacagaaaccgggcaaggcgcctaagctgctgatttattctgcttcgttcctgtacagcggtgtgccgtctcgtttctctggctctggttcgggtactgatttcactctgactatttcgagtctgcagccggaagattttgcgacttattattgtcaacaatatctgtatcaccctgcgacgtttggtcaaggcacgaaagttgaaattaaacgtggtggtggctctggtggtggcagcggtggtgggtcgggtggcggtgaagttcaactggttgagtcaggtggtggcctggtgcaaccgggcggctctctgcgcctgtcttgtgctgcgtcgggttttacgttctctgatagctggattcactgggtacgccaggcaccgggcaaaggtctggaatgggtagcttggatttcaccttatggtggctctacttattacgcggatagcgtgaaaggtcgctttactatttctgcggacactagcaaaaatactgcttacctgcaaatgaattcgctgcgtgctgaggatactgcagtgtattactgtgcgcgtcgtcattggcctggcggctttgattattggggtcaaggtactctggttactgttagcagcttcaaagcggaggctgacaaggccgctgcagcaaaagctgactcctttatgaacgcgggttacaaaaacttcatgaccgaggtaaataatctcaataaacgtatgggtgatctgcgcgacactaatggggatgcaggcgcatgggcacgcattatgtctggtgcaggttcggcggatggcgggtattctgacaattacactcatgttcaggtgggcttcgataaaaaacatgagctggacggtgtggatctgttcactggcgtaaccatgacttatactgattcaagcgcagacagccacgcattttcaggtaaaacgaaatcagttggcggcggtctgtatgcgagcgcactgttcgagagcggcgcctacattgatctaattggcaagtatattcaccatgataatgattacacagggaactttgcaggcctgggcaccaaacactataacacgcattcatggtacgctggcgcagaaaccggctatagataccacctgaccgaggaaacctttatcgaaccgcaagcggaactggtttacggtgcggtcagtggcaagacctttcgttggaaagatggtgatatggatctgtcaatgaaaaaccgcgacttcagccccttgatcggccgcaccggcattgagctgggcaaaaccttctctggcaaagattggtctgttaccgcgcgtgcgggcacttcgtggcaatttgatctgctaaacaacggtgagactgtactgcgtgatgcgagtggcgaaaaacgtattaaaggtgaaaaagatagtagaatgctattcaacgtgggcatgaatgcgcagatcaaagataacatgcgttttgggttggagtttgaaaaatccgcgttcggtaaatataatgttgacaatgctgtgaacgcgaatttccgctacatgttttaactctaacggacttgagtgaggttgtaaagggagttggctcctcggtaccaaattccagaaaagaggcctcccgaaaggggggccttttttcgtttt

SEQ ID NO: 789 - protein, 294 aa, Artificial Sequence
  Description of Artificial Sequence: Synthetic polypeptide
MQVQLVESGGGVVQPGRSLRLSCAASGFTFSSYTMHWVRQAPGKGLEWVTFISYDGNNKYYADSVKGRFTISRDNSKNTLYLQMNSLRAEDTAIYYCARTGWLGPFDYWGQGTLVTVSSGGGSGGGSGGGSGGGEIVLTQSPGTLSLSPGERATLSCRASQSVGSSYLAWYQQKPGQAPRLLIYGAFSRATGIPDRFSGSGSGTDFTLTISRLEPEDFAVYYCQQYGSSPWTFGQGTKVEIKLNPLINEISKIISAAGNFDVKEERAAASLLQLSGNASDFSYGRNSITLTASA

SEQ ID NO: 790 - DNA, 5309 bp, Artificial Sequence
  Description of Artificial Sequence: Synthetic polynucleotide
gaattcgttaagacccactttcacatttaagttgtttttctaatccgcatatgatcaattcaaggccgaataagaaggctggctctgcaccttggtgatcaaataattcgatagcttgtcgtaataatggcggcatactatcagtagtaggtgtttccctttcttctttagcgacttgatgctcttgatcttccaatacgcaacctaaagtaaaatgccccacagcgctgagtgcatataatgcattctctagtgaaaaaccttgttggcataaaaaggctaattgattttcgagagtttcatactgtttttctgtaggccgtgtacctaaatgtacttttgctccatcgcgatgacttagtaaagcacatctaaaacttttagcgttattacgtaaaaaatcttgccagctttccccttctaaagggcaaaagtgagtatggtgcctatctaacatctcaatggctaaggcgtcgagcaaagcccgcttattttttacatgccaatacaatgtaggctgctctacacctagcttctgggcgagtttacgggttgttaaaccttcgattccgacctcattaagcagctctaatgcgctgttaatcactttacttttatctaatctagacatcattaattcctaatttttgttgacactctatcatttatagagttaatttaccactccctatcagtgatagagaaaagtgaatacgatttaattcggaggttttttgatgcaggtacaattagttgagagcggcggcggtgtggttcaaccgggccgtagtctgcgattgtcttgtgctgcatctggttttactttcagttcttacacgatgcactgggttcgccaagctccgggcaaaggcctggagtgggttacctttatttcttacgatggcaataataagtattacgctgattctgtgaaaggtcgctttactattagccgagataactctaaaaatactctgtatctgcaaatgaattctctgcgtgcggaagatactgcgatctattattgtgcgcgtactggttggctgggcccgtttgattattggggccaaggcacgctggttactgttagttcgggcggcggttctggtggcggctctggtggtggctctggcggcggcgagattgtgctgactcaatctccgggcacgctgtcactgtctccgggtgaacgcgcgaccctgtcttgtcgcgcgagtcaaagtgttggttcttcttatctggcttggtatcagcaaaagcctggtcaagcgccgcgtctgttgatttatggcgcgttttcgcgcgcgactggcattccggaccgattttctggttctggttctggcactgatttcactctgaccatttcacgcctggaaccggaggattttgcggtgtactattgccaacaatatggctcatcgccgtggacgtttggccaaggtactaaagttgagattaaacttaatccattaattaatgaaatcagcaaaatcatttcagctgcaggtaattttgatgttaaagaggaaagagctgcagcttctttattgcagttgtccggtaatgccagtgatttttcatatggacggaactcaataactttgacagcatcagcataatttattaatttaaataatagcaatcttactgggctgtgccacataagattgctatttttttggagtcataatggattcttgtcataaaattgattatgggttatacgccctggagattttagcccaataccataacgtctctgttaacccggaagaaattaaacatagatttgacacagacgggactggtctgggattaacgtcatggttgcttgctgcgaaatctttagaactaaaggtaaaacaggtaaaaaaaacaattgaccgattaaactttatttctttgcccgcattagtctggagagaggatggacgtcattttattctgactaaagtcagtaaagaagcaaacagatatcttatttttgatctggagcaacgaaatccccgtgttctcgaacagtctgagtttgaggcgttatatcaggggcatattattcttattgcttcccgttcttctgttaccgggaaactggcaaaatttgactttacctggtttatccctgccattataaaatacagaaaaatatttattgaaacccttgttgtatctgtttttttacaattatttgcattaataaccccccttttttttcaggtggttatggacaaagtattagtacacagggggttttcaacccttaatgttattactgtcgcattatctgttgtggtggtgtttgagattatactcagcggtttaagaacttacatttttgcacatagtacaagtcggattgatgttgagttgggtgccaaactcttccggcatttactggcgctaccgatctcttattttgagagtcgtcgtgttggtgatactgttgccagggtaagagaattagaccagatccgtaattttctgacaggacaggcattaacatctgttctggacttattattttcattcatattttttgcggtaatgtggtattacagcccaaagcttactctggtgatcttattttcgctgccctgttatgctgcatggtctgtttttattagccccattttgcgacgtcgccttgatgataagttttcacggaatgcggataatcaatctttcctggtggaatcagtcacggcgattaacactataaaagctatggcagtctcacctcagatgacgaacatatgggacaaacaattggcaggatatgttgctgcaggctttaaagtgacagtattagccaccattggtcaacaaggaatacagttaatacaaaagactgttatgatcatcaacctgtggttgggagcacacctggttatttccggggatttaagtattggtcagttaattgcttttaatatgcttgctggtcagattgttgcaccggttattcgccttgcacaaatctggcaggatttccagcaggttggtatatcagttacccgccttggtgatgtgcttaactctccaactgaaagttatcatgggaaactggcattaccggaaattaatggtaatatcacttttcgtaatatccggtttcgctataagcctgactctccggttattttagataatatcaatctcagtattaagcagggggaggttattggtattgtcggacgttctggttcaggaaaaagcacattaactaaattaattcaacgtttttatattcctgaaaatggccaggtcttaattgatggacatgatcttgcgttggccgatcctaactggttacgtcgtcaggtgggggttgtgttgcaggacaatgtgctgcttaatcgcagtattattgataatatctcactggctaatcctggtatgtccgtcgaaaaagttatttatgcagcgaaattagcaggcgctcatgattttatttctgaattgcgtgaggggtataacaccattgtcggggaacagggggcaggattatccggaggtcaacgtcaacgcatcgcaattgcaagggcgctggtgaacaaccctaaaatacttatttttgatgaagcaaccagtgctctggattatgagtcggagcatatcatcatgcgcaatatgcacaaaatatgtaagggcagaacggttataatcattgctcatcgtctgtctacagtaaaaaatgcagaccgcattattgtcatggaaaaagggaaaattgttgaacagggtaaacataaggaactgctttctgaaccggaaagtttatacagttacttatatcagttacagtcagactaacagaaagaacagaagaatatgaaaacatggttaatggggttcagcgagttcctgttgcgctataaacttgtctggagtgaaacatggaaaatccggaagcaattagatactccggtacgtgaaaaggacgaaaatgaattcttacccgctcatctggaattaattgaaacgccggtatccagacggccgcgtctggttgcttattttattatggggtttctggttattgctgtcattttatctgttttaggtcaggtggaaattgttgccactgcaaatgggaaattaacactaagtgggcgcagcaaagaaattaaacctattgaaaactcaatagttaaagaaattatcgtaaaagaaggagagtcagtccggaaaggggatgtgttattaaagcttacagcactgggagctgaagctgatacgttaaaaacacagtcatcactgttacagaccaggctggaacaaactcggtatcaaattctgagcaggtcaattgaattaaataaactacctgaactgaagcttcctgatgagccttattttcagaatgtatctgaagaggaagtactgcgtttaacttctttgataaaagaacagttttccacatggcaaaatcagaagtatcaaaaagaactgaatctggataagaaaagagcagagcgattaacaatacttgcccgtataaaccgttatgaaaatttatcgagagttgaaaaaagccgtctggatgatttcaggagtttattgcataaacaggcaattgcaaaacatgctgtacttgagcaggagaataaatatgtcgaggcagcaaatgaattacgggtttataaatcgcaactggagcaaattgagagtgagatattgtctgcaaaagaagaatatcagcttgtcacgcagctttttaaaaatgaaattttagacaagctaagacaaacaacagacaacattgagttattaactctggagttagagaaaaatgaagagcgtcaacaggcttcagtaatcagggcccctgtttcgggaaaagttcagcaactgaaggttcatactgaaggtggggttgttacaacagcggaaacactgatggtcatcgttccggaagatgacacgctggaggttactgctctggtacaaaataaagatattggttttattaacgtcgggcagaatgccatcattaaagtggaggcctttccttacacccgatatggttatctggtgggtaaggtgaaaaatataaatttagatgcaatagaagaccagaaactgggactcgtttttaatgtcattgtttctgttgaagagaatgatttgtcaaccgggaataagcacattccattaagctcgggtatggctgtcactgcagaaataaagactggaatgcgaagcgtaatcagctatcttcttagtcctctggaagagtctgtaacagaaagtttacatgagcgttaagtctcagagccgcggtatccggctcatatcttctcctg

SEQ ID NO: 791 - protein, 294 aa, Artificial Sequence
  Description of Artificial Sequence: Synthetic polypeptide
MEIVLTQSPGTLSLSPGERATLSCRASQSVGSSYLAWYQQKPGQAPRLLIYGAFSRATGIPDRFSGSGSGTDFTLTISRLEPEDFAVYYCQQYGSSPWTFGQGTKVEIKGGGSGGGSGGGSGGGQVQLVESGGGVVQPGRSLRLSCAASGFTFSSYTMHWVRQAPGKGLEWVTFISYDGNNKYYADSVKGRFTISRDNSKNTLYLQMNSLRAEDTAIYYCARTGWLGPFDYWGQGTLVTVSSLNPLINEISKIISAAGNFDVKEERAAASLLQLSGNASDFSYGRNSITLTASA

SEQ ID NO: 792 - DNA, 5309 bp, Artificial Sequence
  Description of Artificial Sequence: Synthetic polynucleotide
gaattcgttaagacccactttcacatttaagttgtttttctaatccgcatatgatcaattcaaggccgaataagaaggctggctctgcaccttggtgatcaaataattcgatagcttgtcgtaataatggcggcatactatcagtagtaggtgtttccctttcttctttagcgacttgatgctcttgatcttccaatacgcaacctaaagtaaaatgccccacagcgctgagtgcatataatgcattctctagtgaaaaaccttgttggcataaaaaggctaattgattttcgagagtttcatactgtttttctgtaggccgtgtacctaaatgtacttttgctccatcgcgatgacttagtaaagcacatctaaaacttttagcgttattacgtaaaaaatcttgccagctttccccttctaaagggcaaaagtgagtatggtgcctatctaacatctcaatggctaaggcgtcgagcaaagcccgcttattttttacatgccaatacaatgtaggctgctctacacctagcttctgggcgagtttacgggttgttaaaccttcgattccgacctcattaagcagctctaatgcgctgttaatcactttacttttatctaatctagacatcattaattcctaatttttgttgacactctatcatttatagagttaatttaccactccctatcagtgatagagaaaagtgaatcacaacgctgagagagagagaaatatggaaattgtactgacccagtcgcctggtaccctgtctctgtcgccgggtgaacgtgctaccctgtcttgtcgtgcttcgcaatcggttggctcgtcttatctggcatggtatcagcaaaaaccgggccaagcgcctcgtctgctgatttatggcgcgttttctcgtgctacgggcattcctgatcgtttttcgggctctggctctggtactgattttacgctgactatcagccgcttggaacctgaagattttgcggtttattattgccaacaatatggctcttctccgtggacgtttggtcaaggcactaaagttgaaattaaaggtggtggctcgggcggtggttctggtggtggtagtggtggtggtcaagtgcagttggttgaatcgggtggcggtgttgtgcagccgggccgttcgttgcgtctgtcttgcgcagcgagtggtttcaccttctcttcttatactatgcactgggtgcgtcaagcacctggcaaaggtctggagtgggtaacttttatttcatacgatggtaataataaatattatgcagattctgttaaaggtcgctttacgatttctcgcgataattcaaaaaatacgctgtatctgcagatgaattcgctgcgcgctgaggatactgcgatctactattgtgcgcgtactggttggctgggtccgtttgattactggggccaaggtacgctggttacagtttcgtcgcttaatccattaattaatgaaatcagcaaaatcatttcagctgcaggtaattttgatgttaaagaggaaagagctgcagcttctttattgcagttgtccggtaatgccagtgatttttcatatggacggaactcaataactttgacagcatcagcataatttattaatttaaataatagcaatcttactgggctgtgccacataagattgctatttttttggagtcataatggattcttgtcataaaattgattatgggttatacgccctggagattttagcccaataccataacgtctctgttaacccggaagaaattaaacatagatttgacacagacgggactggtctgggattaacgtcatggttgcttgctgcgaaatctttagaactaaaggtaaaacaggtaaaaaaaacaattgaccgattaaactttatttctttgcccgcattagtctggagagaggatggacgtcattttattctgactaaagtcagtaaagaagcaaacagatatcttatttttgatctggagcaacgaaatccccgtgttctcgaacagtctgagtttgaggcgttatatcaggggcatattattcttattgcttcccgttcttctgttaccgggaaactggcaaaatttgactttacctggtttatccctgccattataaaatacagaaaaatatttattgaaacccttgttgtatctgtttttttacaattatttgcattaataaccccccttttttttcaggtggttatggacaaagtattagtacacagggggttttcaacccttaatgttattactgtcgcattatctgttgtggtggtgtttgagattatactcagcggtttaagaacttacatttttgcacatagtacaagtcggattgatgttgagttgggtgccaaactcttccggcatttactggcgctaccgatctcttattttgagagtcgtcgtgttggtgatactgttgccagggtaagagaattagaccagatccgtaattttctgacaggacaggcattaacatctgttctggacttattattttcattcatattttttgcggtaatgtggtattacagcccaaagcttactctggtgatcttattttcgctgccctgttatgctgcatggtctgtttttattagccccattttgcgacgtcgccttgatgataagttttcacggaatgcggataatcaatctttcctggtggaatcagtcacggcgattaacactataaaagctatggcagtctcacctcagatgacgaacatatgggacaaacaattggcaggatatgttgctgcaggctttaaagtgacagtattagccaccattggtcaacaaggaatacagttaatacaaaagactgttatgatcatcaacctgtggttgggagcacacctggttatttccggggatttaagtattggtcagttaattgcttttaatatgcttgctggtcagattgttgcaccggttattcgccttgcacaaatctggcaggatttccagcaggttggtatatcagttacccgccttggtgatgtgcttaactctccaactgaaagttatcatgggaaactggcattaccggaaattaatggtaatatcacttttcgtaatatccggtttcgctataagcctgactctccggttattttagataatatcaatctcagtattaagcagggggaggttattggtattgtcggacgttctggttcaggaaaaagcacattaactaaattaattcaacgtttttatattcctgaaaatggccaggtcttaattgatggacatgatcttgcgttggccgatcctaactggttacgtcgtcaggtgggggttgtgttgcaggacaatgtgctgcttaatcgcagtattattgataatatctcactggctaatcctggtatgtccgtcgaaaaagttatttatgcagcgaaattagcaggcgctcatgattttatttctgaattgcgtgaggggtataacaccattgtcggggaacagggggcaggattatccggaggtcaacgtcaacgcatcgcaattgcaagggcgctggtgaacaaccctaaaatacttatttttgatgaagcaaccagtgctctggattatgagtcggagcatatcatcatgcgcaatatgcacaaaatatgtaagggcagaacggttataatcattgctcatcgtctgtctacagtaaaaaatgcagaccgcattattgtcatggaaaaagggaaaattgttgaacagggtaaacataaggaactgctttctgaaccggaaagtttatacagttacttatatcagttacagtcagactaacagaaagaacagaagaatatgaaaacatggttaatggggttcagcgagttcctgttgcgctataaacttgtctggagtgaaacatggaaaatccggaagcaattagatactccggtacgtgaaaaggacgaaaatgaattcttacccgctcatctggaattaattgaaacgccggtatccagacggccgcgtctggttgcttattttattatggggtttctggttattgctgtcattttatctgttttaggtcaggtggaaattgttgccactgcaaatgggaaattaacactaagtgggcgcagcaaagaaattaaacctattgaaaactcaatagttaaagaaattatcgtaaaagaaggagagtcagtccggaaaggggatgtgttattaaagcttacagcactgggagctgaagctgatacgttaaaaacacagtcatcactgttacagaccaggctggaacaaactcggtatcaaattctgagcaggtcaattgaattaaataaactacctgaactgaagcttcctgatgagccttattttcagaatgtatctgaagaggaagtactgcgtttaacttctttgataaaagaacagttttccacatggcaaaatcagaagtatcaaaaagaactgaatctggataagaaaagagcagagcgattaacaatacttgcccgtataaaccgttatgaaaatttatcgagagttgaaaaaagccgtctggatgatttcaggagtttattgcataaacaggcaattgcaaaacatgctgtacttgagcaggagaataaatatgtcgaggcagcaaatgaattacgggtttataaatcgcaactggagcaaattgagagtgagatattgtctgcaaaagaagaatatcagcttgtcacgcagctttttaaaaatgaaattttagacaagctaagacaaacaacagacaacattgagttattaactctggagttagagaaaaatgaagagcgtcaacaggcttcagtaatcagggcccctgtttcgggaaaagttcagcaactgaaggttcatactgaaggtggggttgttacaacagcggaaacactgatggtcatcgttccggaagatgacacgctggaggttactgctctggtacaaaataaagatattggttttattaacgtcgggcagaatgccatcattaaagtggaggcctttccttacacccgatatggttatctggtgggtaaggtgaaaaatataaatttagatgcaatagaagaccagaaactgggactcgtttttaatgtcattgtttctgttgaagagaatgatttgtcaaccgggaataagcacattccattaagctcgggtatggctgtcactgcagaaataaagactggaatgcgaagcgtaatcagctatcttcttagtcctctggaagagtctgtaacagaaagtttacatgagcgttaagtctcagagccgcggtatccggctcatatcttctcctg

SEQ ID NO: 793 - protein, 288 aa, Artificial Sequence
  Description of Artificial Sequence: Synthetic polypeptide
MQVQLVESGGGVVQPGRSLRLDCKASGITFSNSGMHWVRQAPGKGLEWVAVIWYDGSKRYYADSVKGRFTISRDNSKNTLFLQMNSLRAEDTAVYYCATNDDYWGQGTLVTVSSGGGSGGGSGGGSGGGEIVLTQSPATLSLSPGERATLSCRASQSVSSYLAWYQQKPGQAPRLLIYDASNRATGIPARFSGSGSGTDFTLTISSLEPEDFAVYYCQQSSNWPRTFGQGTKVEIKLNPLINEISKIISAAGNFDVKEERAAASLLQLSGNASDFSYGRNSITLTASA

SEQ ID NO: 794 - DNA, 5291 bp, Artificial Sequence
  Description of Artificial Sequence: Synthetic polynucleotide
gaattcgttaagacccactttcacatttaagttgtttttctaatccgcatatgatcaattcaaggccgaataagaaggctggctctgcaccttggtgatcaaataattcgatagcttgtcgtaataatggcggcatactatcagtagtaggtgtttccctttcttctttagcgacttgatgctcttgatcttccaatacgcaacctaaagtaaaatgccccacagcgctgagtgcatataatgcattctctagtgaaaaaccttgttggcataaaaaggctaattgattttcgagagtttcatactgtttttctgtaggccgtgtacctaaatgtacttttgctccatcgcgatgacttagtaaagcacatctaaaacttttagcgttattacgtaaaaaatcttgccagctttccccttctaaagggcaaaagtgagtatggtgcctatctaacatctcaatggctaaggcgtcgagcaaagcccgcttattttttacatgccaatacaatgtaggctgctctacacctagcttctgggcgagtttacgggttgttaaaccttcgattccgacctcattaagcagctctaatgcgctgttaatcactttacttttatctaatctagacatcattaattcctaatttttgttgacactctatcatttatagagttaatttaccactccctatcagtgatagagaaaagtgaagttaaattgaggaggaggcagttccatgcaagtacaactggttgaatccggcggaggagtggtgcaaccgggccgcagtttgcgtctggattgtaaagcttcaggcatcactttttctaattctggtatgcactgggttcgccaagctccgggtaaaggtctggagtgggttgcggtgatctggtatgatggttctaaacgatattatgcggatagtgttaagggtcgttttactatttctcgtgataattctaagaacaccttgtttctgcagatgaatagtctgcgcgctgaggatactgcggtatattattgtgcgactaatgacgattattggggccaaggcacgctggttaccgtgagctctggtggtggttcgggtggtggttctggtggtgggagcggcggtggcgagatcgttctgactcaaagcccggcgactctgagtctgagtccgggtgaacgtgcgactctgagctgccgtgcgtctcagagtgtgtcgagttatctggcgtggtaccaacaaaaaccgggccaggcgccgcgactgctgatttatgatgcttctaatcgtgcgactggtattccggcgcgctttagcggttctggctcaggcactgacttcactctgactatttcttcgctggaaccggaagattttgcggtgtactattgtcaacaatcatctaattggcctcgtacgttcggtcaaggtacaaaagtggagataaaacttaatccattaattaatgaaatcagcaaaatcatttcagctgcaggtaattttgatgttaaagaggaaagagctgcagcttctttattgcagttgtccggtaatgccagtgatttttcatatggacggaactcaataactttgacagcatcagcataatttattaatttaaataatagcaatcttactgggctgtgccacataagattgctatttttttggagtcataatggattcttgtcataaaattgattatgggttatacgccctggagattttagcccaataccataacgtctctgttaacccggaagaaattaaacatagatttgacacagacgggactggtctgggattaacgtcatggttgcttgctgcgaaatctttagaactaaaggtaaaacaggtaaaaaaaacaattgaccgattaaactttatttctttgcccgcattagtctggagagaggatggacgtcattttattctgactaaagtcagtaaagaagcaaacagatatcttatttttgatctggagcaacgaaatccccgtgttctcgaacagtctgagtttgaggcgttatatcaggggcatattattcttattgcttcccgttcttctgttaccgggaaactggcaaaatttgactttacctggtttatccctgccattataaaatacagaaaaatatttattgaaacccttgttgtatctgtttttttacaattatttgcattaataaccccccttttttttcaggtggttatggacaaagtattagtacacagggggttttcaacccttaatgttattactgtcgcattatctgttgtggtggtgtttgagattatactcagcggtttaagaacttacatttttgcacatagtacaagtcggattgatgttgagttgggtgccaaactcttccggcatttactggcgctaccgatctcttattttgagagtcgtcgtgttggtgatactgttgccagggtaagagaattagaccagatccgtaattttctgacaggacaggcattaacatctgttctggacttattattttcattcatattttttgcggtaatgtggtattacagcccaaagcttactctggtgatcttattttcgctgccctgttatgctgcatggtctgtttttattagccccattttgcgacgtcgccttgatgataagttttcacggaatgcggataatcaatctttcctggtggaatcagtcacggcgattaacactataaaagctatggcagtctcacctcagatgacgaacatatgggacaaacaattggcaggatatgttgctgcaggctttaaagtgacagtattagccaccattggtcaacaaggaatacagttaatacaaaagactgttatgatcatcaacctgtggttgggagcacacctggttatttccggggatttaagtattggtcagttaattgcttttaatatgcttgctggtcagattgttgcaccggttattcgccttgcacaaatctggcaggatttccagcaggttggtatatcagttacccgccttggtgatgtgcttaactctccaactgaaagttatcatgggaaactggcattaccggaaattaatggtaatatcacttttcgtaatatccggtttcgctataagcctgactctccggttattttagataatatcaatctcagtattaagcagggggaggttattggtattgtcggacgttctggttcaggaaaaagcacattaactaaattaattcaacgtttttatattcctgaaaatggccaggtcttaattgatggacatgatcttgcgttggccgatcctaactggttacgtcgtcaggtgggggttgtgttgcaggacaatgtgctgcttaatcgcagtattattgataatatctcactggctaatcctggtatgtccgtcgaaaaagttatttatgcagcgaaattagcaggcgctcatgattttatttctgaattgcgtgaggggtataacaccattgtcggggaacagggggcaggattatccggaggtcaacgtcaacgcatcgcaattgcaagggcgctggtgaacaaccctaaaatacttatttttgatgaagcaaccagtgctctggattatgagtcggagcatatcatcatgcgcaatatgcacaaaatatgtaagggcagaacggttataatcattgctcatcgtctgtctacagtaaaaaatgcagaccgcattattgtcatggaaaaagggaaaattgttgaacagggtaaacataaggaactgctttctgaaccggaaagtttatacagttacttatatcagttacagtcagactaacagaaagaacagaagaatatgaaaacatggttaatggggttcagcgagttcctgttgcgctataaacttgtctggagtgaaacatggaaaatccggaagcaattagatactccggtacgtgaaaaggacgaaaatgaattcttacccgctcatctggaattaattgaaacgccggtatccagacggccgcgtctggttgcttattttattatggggtttctggttattgctgtcattttatctgttttaggtcaggtggaaattgttgccactgcaaatgggaaattaacactaagtgggcgcagcaaagaaattaaacctattgaaaactcaatagttaaagaaattatcgtaaaagaaggagagtcagtccggaaaggggatgtgttattaaagcttacagcactgggagctgaagctgatacgttaaaaacacagtcatcactgttacagaccaggctggaacaaactcggtatcaaattctgagcaggtcaattgaattaaataaactacctgaactgaagcttcctgatgagccttattttcagaatgtatctgaagaggaagtactgcgtttaacttctttgataaaagaacagttttccacatggcaaaatcagaagtatcaaaaagaactgaatctggataagaaaagagcagagcgattaacaatacttgcccgtataaaccgttatgaaaatttatcgagagttgaaaaaagccgtctggatgatttcaggagtttattgcataaacaggcaattgcaaaacatgctgtacttgagcaggagaataaatatgtcgaggcagcaaatgaattacgggtttataaatcgcaactggagcaaattgagagtgagatattgtctgcaaaagaagaatatcagcttgtcacgcagctttttaaaaatgaaattttagacaagctaagacaaacaacagacaacattgagttattaactctggagttagagaaaaatgaagagcgtcaacaggcttcagtaatcagggcccctgtttcgggaaaagttcagcaactgaaggttcatactgaaggtggggttgttacaacagcggaaacactgatggtcatcgttccggaagatgacacgctggaggttactgctctggtacaaaataaagatattggttttattaacgtcgggcagaatgccatcattaaagtggaggcctttccttacacccgatatggttatctggtgggtaaggtgaaaaatataaatttagatgcaatagaagaccagaaactgggactcgtttttaatgtcattgtttctgttgaagagaatgatttgtcaaccgggaataagcacattccattaagctcgggtatggctgtcactgcagaaataaagactggaatgcgaagcgtaatcagctatcttcttagtcctctggaagagtctgtaacagaaagtttacatgagcgttaagtctcagagccgcggtatccggctcatatcttctcctg

SEQ ID NO: 795 - protein, 288 aa, Artificial Sequence
  Description of Artificial Sequence: Synthetic polypeptide
MEIVLTQSPATLSLSPGERATLSCRASQSVSSYLAWYQQKPGQAPRLLIYDASNRATGIPARFSGSGSGTDFTLTISSLEPEDFAVYYCQQSSNWPRTFGQGTKVEIKGGGSGGGSGGGSGGGQVQLVESGGGVVQPGRSLRLDCKASGITFSNSGMHWVRQAPGKGLEWVAVIWYDGSKRYYADSVKGRFTISRDNSKNTLFLQMNSLRAEDTAVYYCATNDDYWGQGTLVTVSSLNPLINEISKIISAAGNFDVKEERAAASLLQLSGNASDFSYGRNSITLTASA

SEQ ID NO: 796 - DNA, 5291 bp, Artificial Sequence
  Description of Artificial Sequence: Synthetic polynucleotide
gaattcgttaagacccactttcacatttaagttgtttttctaatccgcatatgatcaattcaaggccgaataagaaggctggctctgcaccttggtgatcaaataattcgatagcttgtcgtaataatggcggcatactatcagtagtaggtgtttccctttcttctttagcgacttgatgctcttgatcttccaatacgcaacctaaagtaaaatgccccacagcgctgagtgcatataatgcattctctagtgaaaaaccttgttggcataaaaaggctaattgattttcgagagtttcatactgtttttctgtaggccgtgtacctaaatgtacttttgctccatcgcgatgacttagtaaagcacatctaaaacttttagcgttattacgtaaaaaatcttgccagctttccccttctaaagggcaaaagtgagtatggtgcctatctaacatctcaatggctaaggcgtcgagcaaagcccgcttattttttacatgccaatacaatgtaggctgctctacacctagcttctgggcgagtttacgggttgttaaaccttcgattccgacctcattaagcagctctaatgcgctgttaatcactttacttttatctaatctagacatcattaattcctaatttttgttgacactctatcatttatagagttaatttaccactccctatcagtgatagagaaaagtgaatataccgaacgcttaaggaggctttatggaaatcgtgctgactcagagtccggcgactctgtctctgagtccgggcgaacgcgcgactctgtcttgccgtgcgtctcaatctgtgtcttcatacttggcttggtaccaacaaaaaccgggccaggcgccgcgactgttgatttatgatgcgtcgaatcgcgcgactggcattccggcgcgcttttcgggtagcggttctggtactgattttacgctgactatctcttctctggagcctgaagatttcgctgtttattactgccaacagtctagtaattggccgcgtactttcggccagggcactaaggtggaaattaaaggtggcggctcgggcggcggctcgggtggtggttctggtggtggccaagtgcaactggtggaaagtggcggcggggtggtgcaaccgggccgttctctgcgcctggattgtaaagcttcaggcattacttttagcaactctggtatgcactgggttcgccaagctccgggcaaaggcctggaatgggtggcggttatttggtacgatggctctaaacgttattacgctgacagtgttaaaggccgctttaccatttctcgtgataattctaaaaataccctgtttctgcaaatgaactcgctgcgcgcggaagatactgctgtttactattgtgcgactaatgatgattactggggtcaaggtaccctggttaccgtgtcttctcttaatccattaattaatgaaatcagcaaaatcatttcagctgcaggtaattttgatgttaaagaggaaagagctgcagcttctttattgcagttgtccggtaatgccagtgatttttcatatggacggaactcaataactttgacagcatcagcataatttattaatttaaataatagcaatcttactgggctgtgccacataagattgctatttttttggagtcataatggattcttgtcataaaattgattatgggttatacgccctggagattttagcccaataccataacgtctctgttaacccggaagaaattaaacatagatttgacacagacgggactggtctgggattaacgtcatggttgcttgctgcgaaatctttagaactaaaggtaaaacaggtaaaaaaaacaattgaccgattaaactttatttctttgcccgcattagtctggagagaggatggacgtcattttattctgactaaagtcagtaaagaagcaaacagatatcttatttttgatctggagcaacgaaatccccgtgttctcgaacagtctgagtttgaggcgttatatcaggggcatattattcttattgcttcccgttcttctgttaccgggaaactggcaaaatttgactttacctggtttatccctgccattataaaatacagaaaaatatttattgaaacccttgttgtatctgtttttttacaattatttgcattaataaccccccttttttttcaggtggttatggacaaagtattagtacacagggggttttcaacccttaatgttattactgtcgcattatctgttgtggtggtgtttgagattatactcagcggtttaagaacttacatttttgcacatagtacaagtcggattgatgttgagttgggtgccaaactcttccggcatttactggcgctaccgatctcttattttgagagtcgtcgtgttggtgatactgttgccagggtaagagaattagaccagatccgtaattttctgacaggacaggcattaacatctgttctggacttattattttcattcatattttttgcggtaatgtggtattacagcccaaagcttactctggtgatcttattttcgctgccctgttatgctgcatggtctgtttttattagccccattttgcgacgtcgccttgatgataagttttcacggaatgcggataatcaatctttcctggtggaatcagtcacggcgattaacactataaaagctatggcagtctcacctcagatgacgaacatatgggacaaacaattggcaggatatgttgctgcaggctttaaagtgacagtattagccaccattggtcaacaaggaatacagttaatacaaaagactgttatgatcatcaacctgtggttgggagcacacctggttatttccggggatttaagtattggtcagttaattgcttttaatatgcttgctggtcagattgttgcaccggttattcgccttgcacaaatctggcaggatttccagcaggttggtatatcagttacccgccttggtgatgtgcttaactctccaactgaaagttatcatgggaaactggcattaccggaaattaatggtaatatcacttttcgtaatatccggtttcgctataagcctgactctccggttattttagataatatcaatctcagtattaagcagggggaggttattggtattgtcggacgttctggttcaggaaaaagcacattaactaaattaattcaacgtttttatattcctgaaaatggccaggtcttaattgatggacatgatcttgcgttggccgatcctaactggttacgtcgtcaggtgggggttgtgttgcaggacaatgtgctgcttaatcgcagtattattgataatatctcactggctaatcctggtatgtccgtcgaaaaagttatttatgcagcgaaattagcaggcgctcatgattttatttctgaattgcgtgaggggtataacaccattgtcggggaacagggggcaggattatccggaggtcaacgtcaacgcatcgcaattgcaagggcgctggtgaacaaccctaaaatacttatttttgatgaagcaaccagtgctctggattatgagtcggagcatatcatcatgcgcaatatgcacaaaatatgtaagggcagaacggttataatcattgctcatcgtctgtctacagtaaaaaatgcagaccgcattattgtcatggaaaaagggaaaattgttgaacagggtaaacataaggaactgctttctgaaccggaaagtttatacagttacttatatcagttacagtcagactaacagaaagaacagaagaatatgaaaacatggttaatggggttcagcgagttcctgttgcgctataaacttgtctggagtgaaacatggaaaatccggaagcaattagatactccggtacgtgaaaaggacgaaaatgaattcttacccgctcatctggaattaattgaaacgccggtatccagacggccgcgtctggttgcttattttattatggggtttctggttattgctgtcattttatctgttttaggtcaggtggaaattgttgccactgcaaatgggaaattaacactaagtgggcgcagcaaagaaattaaacctattgaaaactcaatagttaaagaaattatcgtaaaagaaggagagtcagtccggaaaggggatgtgttattaaagcttacagcactgggagctgaagctgatacgttaaaaacacagtcatcactgttacagaccaggctggaacaaactcggtatcaaattctgagcaggtcaattgaattaaataaactacctgaactgaagcttcctgatgagccttattttcagaatgtatctgaagaggaagtactgcgtttaacttctttgataaaagaacagttttccacatggcaaaatcagaagtatcaaaaagaactgaatctggataagaaaagagcagagcgattaacaatacttgcccgtataaaccgttatgaaaatttatcgagagttgaaaaaagccgtctggatgatttcaggagtttattgcataaacaggcaattgcaaaacatgctgtacttgagcaggagaataaatatgtcgaggcagcaaatgaattacgggtttataaatcgcaactggagcaaattgagagtgagatattgtctgcaaaagaagaatatcagcttgtcacgcagctttttaaaaatgaaattttagacaagctaagacaaacaacagacaacattgagttattaactctggagttagagaaaaatgaagagcgtcaacaggcttcagtaatcagggcccctgtttcgggaaaagttcagcaactgaaggttcatactgaaggtggggttgttacaacagcggaaacactgatggtcatcgttccggaagatgacacgctggaggttactgctctggtacaaaataaagatattggttttattaacgtcgggcagaatgccatcattaaagtggaggcctttccttacacccgatatggttatctggtgggtaaggtgaaaaatataaatttagatgcaatagaagaccagaaactgggactcgtttttaatgtcattgtttctgttgaagagaatgatttgtcaaccgggaataagcacattccattaagctcgggtatggctgtcactgcagaaataaagactggaatgcgaagcgtaatcagctatcttcttagtcctctggaagagtctgtaacagaaagtttacatgagcgttaagtctcagagccgcggtatccggctcatatcttctcctg

SEQ ID NO: 797 - protein, 294 aa, Artificial Sequence
  Description of Artificial Sequence: Synthetic polypeptide
MEVQLVESGGGLVQPGGSLRLSCAASGFTFSDSWIHWVRQAPGKGLEWVAWISPYGGSTYYADSVKGRFTISADTSKNTAYLQMNSLRAEDTAVYYCARRHWPGGFDYWGQGTLVTVSSGGGSGGGSGGGSGGGDIQMTQSPSSLSASVGDRVTITCRASQDVSTAVAWYQQKPGKAPKLLIYSASFLYSGVPSRFSGSGSGTDFTLTISSLQPEDFATYYCQQYLYHPATFGQGTKVEIKRLNPLINEISKIISAAGNFDVKEERAAASLLQLSGNASDFSYGRNSITLTASA

SEQ ID NO: 798 - DNA, 5309 bp, Artificial Sequence
  Description of Artificial Sequence: Synthetic polynucleotide
gaattcgttaagacccactttcacatttaagttgtttttctaatccgcatatgatcaattcaaggccgaataagaaggctggctctgcaccttggtgatcaaataattcgatagcttgtcgtaataatggcggcatactatcagtagtaggtgtttccctttcttctttagcgacttgatgctcttgatcttccaatacgcaacctaaagtaaaatgccccacagcgctgagtgcatataatgcattctctagtgaaaaaccttgttggcataaaaaggctaattgattttcgagagtttcatactgtttttctgtaggccgtgtacctaaatgtacttttgctccatcgcgatgacttagtaaagcacatctaaaacttttagcgttattacgtaaaaaatcttgccagctttccccttctaaagggcaaaagtgagtatggtgcctatctaacatctcaatggctaaggcgtcgagcaaagcccgcttattttttacatgccaatacaatgtaggctgctctacacctagcttctgggcgagtttacgggttgttaaaccttcgattccgacctcattaagcagctctaatgcgctgttaatcactttacttttatctaatctagacatcattaattcctaatttttgttgacactctatcatttatagagttaatttaccactccctatcagtgatagagaaaagtgaagatagggaccaggtaaggaggatgaatggaagtgcagctggtggagtcaggtggaggcttggtgcaaccgggcggttcactgcgtctgtcatgtgcggcgtctgggtttacttttagtgactcttggattcactgggtgcgccaggctccgggtaaaggcctggaatgggtagcttggattagtccttacggtggctcgacctattatgctgattcggtaaagggtcgctttactattagcgctgatacttctaaaaatactgcatacctgcagatgaatagcctgcgcgctgaggatactgctgtgtattattgcgcgcgtcgccactggccgggcggctttgattattggggccaaggtactctggttaccgtgtctagtggcggtggtagcggcggcggctcaggtggcggctcgggcggtggcgacattcagatgactcagtctccgtcttctttgtcggcgagcgtgggcgatcgtgttaccatcacgtgtcgcgcgagccaagatgtgtcgactgcggtggcttggtatcaacaaaaaccgggtaaagctccgaaactgctgatttatagtgcgtcttttttgtattctggtgttccgtctcgtttctctggctcaggtagcggtactgattttacgctgactatttcttcactgcaaccggaagattttgctacgtattattgtcaacaatatctgtatcacccggcgacgtttggtcagggtactaaggtggagataaaacgccttaatccattaattaatgaaatcagcaaaatcatttcagctgcaggtaattttgatgttaaagaggaaagagctgcagcttctttattgcagttgtccggtaatgccagtgatttttcatatggacggaactcaataactttgacagcatcagcataatttattaatttaaataatagcaatcttactgggctgtgccacataagattgctatttttttggagtcataatggattcttgtcataaaattgattatgggttatacgccctggagattttagcccaataccataacgtctctgttaacccggaagaaattaaacatagatttgacacagacgggactggtctgggattaacgtcatggttgcttgctgcgaaatctttagaactaaaggtaaaacaggtaaaaaaaacaattgaccgattaaactttatttctttgcccgcattagtctggagagaggatggacgtcattttattctgactaaagtcagtaaagaagcaaacagatatcttatttttgatctggagcaacgaaatccccgtgttctcgaacagtctgagtttgaggcgttatatcaggggcatattattcttattgcttcccgttcttctgttaccgggaaactggcaaaatttgactttacctggtttatccctgccattataaaatacagaaaaatatttattgaaacccttgttgtatctgtttttttacaattatttgcattaataaccccccttttttttcaggtggttatggacaaagtattagtacacagggggttttcaacccttaatgttattactgtcgcattatctgttgtggtggtgtttgagattatactcagcggtttaagaacttacatttttgcacatagtacaagtcggattgatgttgagttgggtgccaaactcttccggcatttactggcgctaccgatctcttattttgagagtcgtcgtgttggtgatactgttgccagggtaagagaattagaccagatccgtaattttctgacaggacaggcattaacatctgttctggacttattattttcattcatattttttgcggtaatgtggtattacagcccaaagcttactctggtgatcttattttcgctgccctgttatgctgcatggtctgtttttattagccccattttgcgacgtcgccttgatgataagttttcacggaatgcggataatcaatctttcctggtggaatcagtcacggcgattaacactataaaagctatggcagtctcacctcagatgacgaacatatgggacaaacaattggcaggatatgttgctgcaggctttaaagtgacagtattagccaccattggtcaacaaggaatacagttaatacaaaagactgttatgatcatcaacctgtggttgggagcacacctggttatttccggggatttaagtattggtcagttaattgcttttaatatgcttgctggtcagattgttgcaccggttattcgccttgcacaaatctggcaggatttccagcaggttggtatatcagttacccgccttggtgatgtgcttaactctccaactgaaagttatcatgggaaactggcattaccggaaattaatggtaatatcacttttcgtaatatccggtttcgctataagcctgactctccggttattttagataatatcaatctcagtattaagcagggggaggttattggtattgtcggacgttctggttcaggaaaaagcacattaactaaattaattcaacgtttttatattcctgaaaatggccaggtcttaattgatggacatgatcttgcgttggccgatcctaactggttacgtcgtcaggtgggggttgtgttgcaggacaatgtgctgcttaatcgcagtattattgataatatctcactggctaatcctggtatgtccgtcgaaaaagttatttatgcagcgaaattagcaggcgctcatgattttatttctgaattgcgtgaggggtataacaccattgtcggggaacagggggcaggattatccggaggtcaacgtcaacgcatcgcaattgcaagggcgctggtgaacaaccctaaaatacttatttttgatgaagcaaccagtgctctggattatgagtcggagcatatcatcatgcgcaatatgcacaaaatatgtaagggcagaacggttataatcattgctcatcgtctgtctacagtaaaaaatgcagaccgcattattgtcatggaaaaagggaaaattgttgaacagggtaaacataaggaactgctttctgaaccggaaagtttatacagttacttatatcagttacagtcagactaacagaaagaacagaagaatatgaaaacatggttaatggggttcagcgagttcctgttgcgctataaacttgtctggagtgaaacatggaaaatccggaagcaattagatactccggtacgtgaaaaggacgaaaatgaattcttacccgctcatctggaattaattgaaacgccggtatccagacggccgcgtctggttgcttattttattatggggtttctggttattgctgtcattttatctgttttaggtcaggtggaaattgttgccactgcaaatgggaaattaacactaagtgggcgcagcaaagaaattaaacctattgaaaactcaatagttaaagaaattatcgtaaaagaaggagagtcagtccggaaaggggatgtgttattaaagcttacagcactgggagctgaagctgatacgttaaaaacacagtcatcactgttacagaccaggctggaacaaactcggtatcaaattctgagcaggtcaattgaattaaataaactacctgaactgaagcttcctgatgagccttattttcagaatgtatctgaagaggaagtactgcgtttaacttctttgataaaagaacagttttccacatggcaaaatcagaagtatcaaaaagaactgaatctggataagaaaagagcagagcgattaacaatacttgcccgtataaaccgttatgaaaatttatcgagagttgaaaaaagccgtctggatgatttcaggagtttattgcataaacaggcaattgcaaaacatgctgtacttgagcaggagaataaatatgtcgaggcagcaaatgaattacgggtttataaatcgcaactggagcaaattgagagtgagatattgtctgcaaaagaagaatatcagcttgtcacgcagctttttaaaaatgaaattttagacaagctaagacaaacaacagacaacattgagttattaactctggagttagagaaaaatgaagagcgtcaacaggcttcagtaatcagggcccctgtttcgggaaaagttcagcaactgaaggttcatactgaaggtggggttgttacaacagcggaaacactgatggtcatcgttccggaagatgacacgctggaggttactgctctggtacaaaataaagatattggttttattaacgtcgggcagaatgccatcattaaagtggaggcctttccttacacccgatatggttatctggtgggtaaggtgaaaaatataaatttagatgcaatagaagaccagaaactgggactcgtttttaatgtcattgtttctgttgaagagaatgatttgtcaaccgggaataagcacattccattaagctcgggtatggctgtcactgcagaaataaagactggaatgcgaagcgtaatcagctatcttcttagtcctctggaagagtctgtaacagaaagtttacatgagcgttaagtctcagagccgcggtatccggctcatatcttctcctg

SEQ ID NO: 799 - protein, 294 aa, Artificial Sequence
  Description of Artificial Sequence: Synthetic polypeptide
MDIQMTQSPSSLSASVGDRVTITCRASQDVSTAVAWYQQKPGKAPKLLIYSASFLYSGVPSRFSGSGSGTDFTLTISSLQPEDFATYYCQQYLYHPATFGQGTKVEIKRGGGSGGGSGGGSGGGEVQLVESGGGLVQPGGSLRLSCAASGFTFSDSWIHWVRQAPGKGLEWVAWISPYGGSTYYADSVKGRFTISADTSKNTAYLQMNSLRAEDTAVYYCARRHWPGGFDYWGQGTLVTVSSLNPLINEISKIISAAGNFDVKEERAAASLLQLSGNASDFSYGRNSITLTASA

SEQ ID NO: 800 - DNA, 5309 bp, Artificial Sequence
  Description of Artificial Sequence: Synthetic polynucleotide
gaattcgttaagacccactttcacatttaagttgtttttctaatccgcatatgatcaattcaaggccgaataagaaggctggctctgcaccttggtgatcaaataattcgatagcttgtcgtaataatggcggcatactatcagtagtaggtgtttccctttcttctttagcgacttgatgctcttgatcttccaatacgcaacctaaagtaaaatgccccacagcgctgagtgcatataatgcattctctagtgaaaaaccttgttggcataaaaaggctaattgattttcgagagtttcatactgtttttctgtaggccgtgtacctaaatgtacttttgctccatcgcgatgacttagtaaagcacatctaaaacttttagcgttattacgtaaaaaatcttgccagctttccccttctaaagggcaaaagtgagtatggtgcctatctaacatctcaatggctaaggcgtcgagcaaagcccgcttattttttacatgccaatacaatgtaggctgctctacacctagcttctgggcgagtttacgggttgttaaaccttcgattccgacctcattaagcagctctaatgcgctgttaatcactttacttttatctaatctagacatcattaattcctaatttttgttgacactctatcatttatagagttaatttaccactccctatcagtgatagagaaaagtgaaataaatcccttcatgaggaggtaagatggatattcaaatgactcaatctccgagctctctgagtgcgtctgtgggtgatcgtgtgactattacttgtcgtgcgtctcaagatgtttcaactgcggttgcgtggtatcaacagaaaccgggcaaggcgcctaagctgctgatttattctgcttcgttcctgtacagcggtgtgccgtctcgtttctctggctctggttcgggtactgatttcactctgactatttcgagtctgcagccggaagattttgcgacttattattgtcaacaatatctgtatcaccctgcgacgtttggtcaaggcacgaaagttgaaattaaacgtggtggtggctctggtggtggcagcggtggtgggtcgggtggcggtgaagttcaactggttgagtcaggtggtggcctggtgcaaccgggcggctctctgcgcctgtcttgtgctgcgtcgggttttacgttctctgatagctggattcactgggtacgccaggcaccgggcaaaggtctggaatgggtagcttggatttcaccttatggtggctctacttattacgcggatagcgtgaaaggtcgctttactatttctgcggacactagcaaaaatactgcttacctgcaaatgaattcgctgcgtgctgaggatactgcagtgtattactgtgcgcgtcgtcattggcctggcggctttgattattggggtcaaggtactctggttactgttagcagccttaatccattaattaatgaaatcagcaaaatcatttcagctgcaggtaattttgatgttaaagaggaaagagctgcagcttctttattgcagttgtccggtaatgccagtgatttttcatatggacggaactcaataactttgacagcatcagcataatttattaatttaaataatagcaatcttactgggctgtgccacataagattgctatttttttggagtcataatggattcttgtcataaaattgattatgggttatacgccctggagattttagcccaataccataacgtctctgttaacccggaagaaattaaacatagatttgacacagacgggactggtctgggattaacgtcatggttgcttgctgcgaaatctttagaactaaaggtaaaacaggtaaaaaaaacaattgaccgattaaactttatttctttgcccgcattagtctggagagaggatggacgtcattttattctgactaaagtcagtaaagaagcaaacagatatcttatttttgatctggagcaacgaaatccccgtgttctcgaacagtctgagtttgaggcgttatatcaggggcatattattcttattgcttcccgttcttctgttaccgggaaactggcaaaatttgactttacctggtttatccctgccattataaaatacagaaaaatatttattgaaacccttgttgtatctgtttttttacaattatttgcattaataaccccccttttttttcaggtggttatggacaaagtattagtacacagggggttttcaacccttaatgttattactgtcgcattatctgttgtggtggtgtttgagattatactcagcggtttaagaacttacatttttgcacatagtacaagtcggattgatgttgagttgggtgccaaactcttccggcatttactggcgctaccgatctcttattttgagagtcgtcgtgttggtgatactgttgccagggtaagagaattagaccagatccgtaattttctgacaggacaggcattaacatctgttctggacttattattttcattcatattttttgcggtaatgtggtattacagcccaaagcttactctggtgatcttattttcgctgccctgttatgctgcatggtctgtttttattagccccattttgcgacgtcgccttgatgataagttttcacggaatgcggataatcaatctttcctggtggaatcagtcacggcgattaacactataaaagctatggcagtctcacctcagatgacgaacatatgggacaaacaattggcaggatatgttgctgcaggctttaaagtgacagtattagccaccattggtcaacaaggaatacagttaatacaaaagactgttatgatcatcaacctgtggttgggagcacacctggttatttccggggatttaagtattggtcagttaattgcttttaatatgcttgctggtcagattgttgcaccggttattcgccttgcacaaatctggcaggatttccagcaggttggtatatcagttacccgccttggtgatgtgcttaactctccaactgaaagttatcatgggaaactggcattaccggaaattaatggtaatatcacttttcgtaatatccggtttcgctataagcctgactctccggttattttagataatatcaatctcagtattaagcagggggaggttattggtattgtcggacgttctggttcaggaaaaagcacattaactaaattaattcaacgtttttatattcctgaaaatggccaggtcttaattgatggacatgatcttgcgttggccgatcctaactggttacgtcgtcaggtgggggttgtgttgcaggacaatgtgctgcttaatcgcagtattattgataatatctcactggctaatcctggtatgtccgtcgaaaaagttatttatgcagcgaaattagcaggcgctcatgattttatttctgaattgcgtgaggggtataacaccattgtcggggaacagggggcaggattatccggaggtcaacgtcaacgcatcgcaattgcaagggcgctggtgaacaaccctaaaatacttatttttgatgaagcaaccagtgctctggattatgagtcggagcatatcatcatgcgcaatatgcacaaaatatgtaagggcagaacggttataatcattgctcatcgtctgtctacagtaaaaaatgcagaccgcattattgtcatggaaaaagggaaaattgttgaacagggtaaacataaggaactgctttctgaaccggaaagtttatacagttacttatatcagttacagtcagactaacagaaagaacagaagaatatgaaaacatggttaatggggttcagcgagttcctgttgcgctataaacttgtctggagtgaaacatggaaaatccggaagcaattagatactccggtacgtgaaaaggacgaaaatgaattcttacccgctcatctggaattaattgaaacgccggtatccagacggccgcgtctggttgcttattttattatggggtttctggttattgctgtcattttatctgttttaggtcaggtggaaattgttgccactgcaaatgggaaattaacactaagtgggcgcagcaaagaaattaaacctattgaaaactcaatagttaaagaaattatcgtaaaagaaggagagtcagtccggaaaggggatgtgttattaaagcttacagcactgggagctgaagctgatacgttaaaaacacagtcatcactgttacagaccaggctggaacaaactcggtatcaaattctgagcaggtcaattgaattaaataaactacctgaactgaagcttcctgatgagccttattttcagaatgtatctgaagaggaagtactgcgtttaacttctttgataaaagaacagttttccacatggcaaaatcagaagtatcaaaaagaactgaatctggataagaaaagagcagagcgattaacaatacttgcccgtataaaccgttatgaaaatttatcgagagttgaaaaaagccgtctggatgatttcaggagtttattgcataaacaggcaattgcaaaacatgctgtacttgagcaggagaataaatatgtcgaggcagcaaatgaattacgggtttataaatcgcaactggagcaaattgagagtgagatattgtctgcaaaagaagaatatcagcttgtcacgcagctttttaaaaatgaaattttagacaagctaagacaaacaacagacaacattgagttattaactctggagttagagaaaaatgaagagcgtcaacaggcttcagtaatcagggcccctgtttcgggaaaagttcagcaactgaaggttcatactgaaggtggggttgttacaacagcggaaacactgatggtcatcgttccggaagatgacacgctggaggttactgctctggtacaaaataaagatattggttttattaacgtcgggcagaatgccatcattaaagtggaggcctttccttacacccgatatggttatctggtgggtaaggtgaaaaatataaatttagatgcaatagaagaccagaaactgggactcgtttttaatgtcattgtttctgttgaagagaatgatttgtcaaccgggaataagcacattccattaagctcgggtatggctgtcactgcagaaataaagactggaatgcgaagcgtaatcagctatcttcttagtcctctggaagagtctgtaacagaaagtttacatgagcgttaagtctcagagccgcggtatccggctcatatcttctcctg

SEQ ID NO: 801 - DNA, 104 bp, Artificial Sequence
  Description of Artificial Sequence: Synthetic polynucleotide
agcgggaataaggggcagagaaaagagtatttcgtcgactaacaaaaaatggctgtttgtgaaaaaaattctaaaggttgttttacgacagacgataacagggt

SEQ ID NO: 802 - DNA, 45 bp, Artificial Sequence
  Description of Artificial Sequence: Synthetic oligonucleotide
tgacggcgattgagccgacgggtggaaacccaaaacgtaatcaac

SEQ ID NO: 803 - DNA, 96 bp, Artificial Sequence
  Description of Artificial Sequence: Synthetic oligonucleotide
atctaatctagacatcattaattcctaatttttgttgacactctatcattgatagagttattttaccactccctatcagtgatagagaaaagtgaa

SEQ ID NO: 804 - DNA, 705 bp, Artificial Sequence
  Description of Artificial Sequence: Synthetic polynucleotide
gaattcgttaagacccactttcacatttaagttgtttttctaatccgcatatgatcaattcaaggccgaataagaaggctggctctgcaccttggtgatcaaataattcgatagcttgtcgtaataatggcggcatactatcagtagtaggtgtttccctttcttctttagcgacttgatgctcttgatcttccaatacgcaacctaaagtaaaatgccccacagcgctgagtgcatataatgcattctctagtgaaaaaccttgttggcataaaaaggctaattgattttcgagagtttcatactgtttttctgtaggccgtgtacctaaatgtacttttgctccatcgcgatgacttagtaaagcacatctaaaacttttagcgttattacgtaaaaaatcttgccagctttccccttctaaagggcaaaagtgagtatggtgcctatctaacatctcaatggctaaggcgtcgagcaaagcccgcttattttttacatgccaatacaatgtaggctgctctacacctagcttctgggcgagtttacgggttgttaaaccttcgattccgacctcattaagcagctctaatgcgctgttaatcactttacttttatctaatctagacatcattaattcctaatttttgttgacactctatcatttatagagttaatttaccactccctatcagtgatagagaa

SEQ ID NO: 805 - DNA, 25 bp, Artificial Sequence
  Description of Artificial Sequence: Synthetic oligonucleotide
aaataaaaatgaggaggcaattcta

SEQ ID NO: 806 - DNA, 25 bp, Artificial Sequence
  Description of Artificial Sequence: Synthetic oligonucleotide
agattataaggagttaaatagaaaa

SEQ ID NO: 807 - DNA, 35 bp, Artificial Sequence
  Description of Artificial Sequence: Synthetic oligonucleotide
ctcaaagaattataggaaaggaggaagcgataagt

SEQ ID NO: 808 - DNA, 25 bp, Artificial Sequence
  Description of Artificial Sequence: Synthetic oligonucleotide
atcaccaatttgaggaaaggtaaat

SEQ ID NO: 809 - DNA, 25 bp, Artificial Sequence
  Description of Artificial Sequence: Synthetic oligonucleotide
tggcagacgcctaaggaggaagacc

SEQ ID NO: 810 - DNA, 25 bp, Artificial Sequence
  Description of Artificial Sequence: Synthetic oligonucleotide
tacataattttggggagggtactcg

SEQ ID NO: 811 - DNA, 25 bp, Artificial Sequence
  Description of Artificial Sequence: Synthetic oligonucleotide
ttaaatatcaactagaggtcaccaa

SEQ ID NO: 812 - DNA, 25 bp, Artificial Sequence
  Description of Artificial Sequence: Synthetic oligonucleotide
tacgatttaattcggaggttttttg

SEQ ID NO: 813 - DNA, 25 bp, Artificial Sequence
  Description of Artificial Sequence: Synthetic oligonucleotide
tcacaacgctgagagagagagaaat

SEQ ID NO: 814 - DNA, 25 bp, Artificial Sequence
  Description of Artificial Sequence: Synthetic oligonucleotide
gttaaattgaggaggaggcagttcc

SEQ ID NO: 815 - DNA, 25 bp, Artificial Sequence
  Description of Artificial Sequence: Synthetic oligonucleotide
tataccgaacgcttaaggaggcttt

SEQ ID NO: 816 - DNA, 25 bp, Artificial Sequence
  Description of Artificial Sequence: Synthetic oligonucleotide
ataaatcccttcatgaggaggtaag

SEQ ID NO: 817 - DNA, 25 bp, Artificial Sequence
  Description of Artificial Sequence: Synthetic oligonucleotide
gatagggaccaggtaaggaggatga

SEQ ID NO: 818 - DNA, 200 bp, Artificial Sequence
  Description of Artificial Sequence: Synthetic polynucleotide
tcgccgtaacctgattaactgagactgacggcaacgccaaattgcctgatgcgctgcgcttatcaggcctacaaggggaattgcaatttattgaatttgcacatttttgtaggccggataaggcgtttacgccgcatccggcaacatgaatggtaatttgccagcaacgtgcttccccgccaacggcggggttttttctg

SEQ ID NO: 819 - DNA, 96 bp, Artificial Sequence
  Description of Artificial Sequence: Synthetic oligonucleotide
ctctaacggacttgagtgaggttgtaaagggagttggctcctcggtaccaaattccagaaaagaggcctcccgaaaggggggccttttttcgtttt

SEQ ID NO: 820 - DNA, 38 bp, Artificial Sequence
  Description of Artificial Sequence: Synthetic oligonucleotide
gtctcagagccgcggtatccggctcatatcttctcctg

SEQ ID NO: 821 - DNA, 177 bp, Artificial Sequence
  Description of Artificial Sequence: Synthetic polynucleotide
atgaacaaagtatatagcctgaaatattgcccagtaactgggggtctgattgtagtcagtgaactggcatcccgcgtcatcaaaaaaacctgccgtcgtctgactcacatcctgctggcgggtattccggctgtgtatctgtactacccgcagatctcccaggcaggtatcgtccgc

SEQ ID NO: 822 - DNA, 921 bp, Artificial Sequence
  Description of Artificial Sequence: Synthetic polynucleotide
ttcaaagcggaggctgacaaggccgctgcagcaaaagctgactcctttatgaacgcgggttacaaaaacttcatgaccgaggtaaataatctcaataaacgtatgggtgatctgcgcgacactaatggggatgcaggcgcatgggcacgcattatgtctggtgcaggttcggcggatggcgggtattctgacaattacactcatgttcaggtgggcttcgataaaaaacatgagctggacggtgtggatctgttcactggcgtaaccatgacttatactgattcaagcgcagacagccacgcattttcaggtaaaacgaaatcagttggcggcggtctgtatgcgagcgcactgttcgagagcggcgcctacattgatctaattggcaagtatattcaccatgataatgattacacagggaactttgcaggcctgggcaccaaacactataacacgcattcatggtacgctggcgcagaaaccggctatagataccacctgaccgaggaaacctttatcgaaccgcaagcggaactggtttacggtgcggtcagtggcaagacctttcgttggaaagatggtgatatggatctgtcaatgaaaaaccgcgacttcagccccttgatcggccgcaccggcattgagctgggcaaaaccttctctggcaaagattggtctgttaccgcgcgtgcgggcacttcgtggcaatttgatctgctaaacaacggtgagactgtactgcgtgatgcgagtggcgaaaaacgtattaaaggtgaaaaagatagtagaatgctattcaacgtgggcatgaatgcgcagatcaaagataacatgcgttttgggttggagtttgaaaaatccgcgttcggtaaatataatgttgacaatgctgtgaacgcgaatttccgctacatgttttaa

SEQ ID NO: 823 - DNA, 729 bp, Artificial Sequence
  Description of Artificial Sequence: Synthetic polynucleotide
atgcaagtgcaactggtagagtccggtgggggcgtggtgcagccgggtcgcagcctgcgtctgtcgtgcgcggcgagtggttttacgttttcgagttatactatgcactgggttcgtcaagcgccgggcaaaggcctggaatgggttactttcatttcttacgatggtaataataaatattatgcggattctgtgaaaggtcgctttactatttcgcgcgataacagtaaaaacactctgtatctgcaaatgaattctctgcgtgcagaggatactgctatctattactgcgcgcgtacgggctggttgggcccgtttgattattggggccaaggcactttggttactgtgtcatcgggcgggggctctggcggtggttcaggtggtggcagtggtggtggcgagatcgtgttgactcaatctccgggtactctgtctctgtctccgggtgaacgcgcgaccctgtcttgccgcgcttctcagagtgttggttcatcgtatctggcatggtatcaacagaaaccgggtcaagcgccgcgtctgctgatttacggtgcttttagtcgcgcaaccgggattccggatcgattttctggttcaggttctggcactgactttactttgactattagtcgtctggaaccggaggacttcgcggtttattattgccaacagtatggttcttctccgtggacctttggtcaaggcactaaagttgaaattaaataa

SEQ ID NO: 824 - DNA, 729 bp, Artificial Sequence
  Description of Artificial Sequence: Synthetic polynucleotide
atggagattgtactgacccagagccctggtacattgtctttgtcgcctggtgaacgcgcgactctgtcttgtcgtgcgtctcagtctgttggtagttcgtatctggcgtggtatcaacaaaaaccgggccaagctccgcgtctgctgatttacggtgcatttagccgcgcgactggcattccggaccgcttttctgggtctggctcaggtaccgattttactctgactatttcgcgtctggagccggaggatttcgcggtttattactgccagcaatatggttctagtccgtggaccttcggccaaggtactaaagtggaaatcaaaggcgggggttcgggtggtggctctgggggtggctcgggcggtgggcaggtgcaactggttgagagtggtggcggcgttgttcaaccgggccgctctctgcgcctgtcgtgcgctgcttctggctttacctttagctcttatacgatgcactgggttcgccaagctccgggtaaaggtctggagtgggtgactttcatttcttacgatggtaacaacaaatattatgctgattctgttaaaggccgttttactatttctcgagacaatagcaaaaacactctgtacctgcagatgaattctctgcgcgctgaagacaccgcgatttattattgtgcgcgcactggttggctgggtccgtttgattattggggtcagggcacgctggttactgttagctcgtga

SEQ ID NO: 825 - DNA, 711 bp, Artificial Sequence
  Description of Artificial Sequence: Synthetic polynucleotide
atgcaggtgcaattggtggagtcgggtggcggcgtggtgcaaccgggtcgtagcctgcgcctggattgtaaagcgtcaggcatcacgtttagcaattctggcatgcactgggtgcgtcaagcgccgggcaaaggtctggagtgggttgcggtaatttggtacgatggttctaaacgctattacgcggatagtgtgaaaggtcgctttactatctctcgcgataattctaaaaacaccctgtttctgcaaatgaattcgttgcgtgcggaagatactgcggtatattattgtgctactaacgatgattattggggtcaaggcaccctggtgactgtttcgagcggcggtggtagcggcggcggctctggtggtggttctggtggcggtgagattgtgctgactcaaagcccggcgaccctgtctctgtcgccgggtgaacgcgctactctgagttgccgtgcgtcgcaaagcgtgtcttcttatctggcgtggtaccaacaaaaaccgggtcaagcgccgcgcctgctgatatatgatgctagtaatcgtgcaacgggtattccggcacgcttttcaggttctggcagcggcaccgatttcactctgactatctcgtcactggagccggaagactttgcggtttattattgtcagcaatcttctaattggccgcgtacgtttggtcagggcactaaagttgaaatcaaataa

SEQ ID NO: 826 - DNA, 711 bp, Artificial Sequence
  Description of Artificial Sequence: Synthetic polynucleotide
atggaaatcgttttaacgcagtcgccggcgactctgtctttgtcgcctggtgaacgtgctacgctgtcttgccgcgcgtcacagtctgtgtcgtcatatctggcttggtaccaacagaaaccgggccaagctccgcgcctgctgatttatgatgcgtctaatcgcgcgaccggcattccggcgcgtttttctggctccggctctggcaccgactttactctgactatttcgtctctggaaccggaagattttgcggtgtactattgccagcaatcttctaattggccgcgcacgtttggtcaaggtaccaaggttgagatcaaaggtggtggctcgggcggcggttcgggcggcggctcaggtggtggccaagttcagttggttgagtctggcgggggcgtagtacaaccgggtcgttctttgcgtctggattgcaaagcgagcggtattacctttagcaattcaggtatgcactgggtgcgccaagcgccgggcaaaggcctggaatgggttgcggtgatttggtacgatggctcgaaacgttattatgctgacagcgttaaaggtcgttttactattagccgtgataattccaaaaatacgctgtttctgcagatgaatagcctgcgtgctgaagacactgcggtttattactgtgctactaatgatgattactggggccagggcaccctggtgactgtgagttcttaa

SEQ ID NO: 827 - DNA, 729 bp, Artificial Sequence
  Description of Artificial Sequence: Synthetic polynucleotide
atggatattcagatgactcagagccctagctcactgtctgcgtcagttggcgatcgtgtgactattacctgtcgcgctagtcaggatgtgtctacggcggttgcgtggtatcaacagaaaccgggcaaagctccgaaactgttgatttattcagcgtctttcctgtattcgggtgtgccttctcgcttttcgggctctggtagcggtactgattttacgctgactattagttcactgcaaccggaggactttgcgacttattattgccaacaatacctgtatcacccggcgacctttggtcaaggcactaaagtggaaattaaacgcggcggcggcagcggtggcggctctggtggtgggtctggtggtggtgaggttcagctggttgagtctggtggtggtctggttcaacctgggggcagcctgcgcctgtcgtgcgcggcgtctggttttacgttctcagattcttggattcactgggtacgtcaagctccgggcaaaggtctggagtgggtggcgtggatttctccgtatggcggttcgacgtattacgcggactctgttaaagggcgttttacgatctcagcggatacttctaaaaatactgcgtatctgcaaatgaattctctgcgagcggaggataccgcggtgtattactgtgctcgccgccactggcctggtggtttcgattattggggtcaaggtaccctggtgactgtttcgtcttaa

SEQ ID NO: 828 - DNA, 729 bp, Artificial Sequence
  Description of Artificial Sequence: Synthetic polynucleotide
atggaagttcagctggtggagagtggtggcggtctggtgcagccgggcggctctctgcgtctgagctgtgcggcgtctggctttacgttttctgacagttggattcactgggtgcgccaagcaccgggcaaaggcctggagtgggtggcgtggatttctccgtatggcggtagtacttattatgctgattctgtgaaaggccgttttaccatttcggcggacacttcaaaaaataccgcgtatctgcaaatgaatagcctgcgcgctgaagacacggctgtttactactgtgctcgccgccactggccgggcggtttcgattattggggccaaggcactctggtgactgtgagctctggcggcgggtcgggtggcggttctggcggtggcagtggcggtggtgatattcaaatgacccaatctccgtcgtctctgagcgcgtctgtgggcgatcgtgtaaccattacttgtcgtgcgtcgcaggatgtgtctactgctgtggcgtggtatcagcaaaaaccgggtaaagctccgaaactgctgatttatagcgcttcttttctgtatagtggtgttccgtcacgttttagcggttcaggctctggtactgatttcacactgactatttcttctctgcaaccggaagatttcgcgacttattattgtcagcagtacttgtaccacccggcaacttttggtcagggcactaaagttgaaattaaacgttaa

SEQ ID NO: 829 - DNA, 1821 bp, Artificial Sequence
  Description of Artificial Sequence: Synthetic polynucleotide
atgaacaaagtatatagcctgaaatattgcccagtaactgggggtctgattgtagtcagtgaactggcatcccgcgtcatcaaaaaaacctgccgtcgtctgactcacatcctgctggcgggtattccggctgtgtatctgtactacccgcagatctcccaggcaggtatcgtccgccaggtacaattagttgagagcggcggcggtgtggttcaaccgggccgtagtctgcgattgtcttgtgctgcatctggttttactttcagttcttacacgatgcactgggttcgccaagctccgggcaaaggcctggagtgggttacctttatttcttacgatggcaataataagtattacgctgattctgtgaaaggtcgctttactattagccgagataactctaaaaatactctgtatctgcaaatgaattctctgcgtgcggaagatactgcgatctattattgtgcgcgtactggttggctgggcccgtttgattattggggccaaggcacgctggttactgttagttcgggcggcggttctggtggcggctctggtggtggctctggcggcggcgagattgtgctgactcaatctccgggcacgctgtcactgtctccgggtgaacgcgcgaccctgtcttgtcgcgcgagtcaaagtgttggttcttcttatctggcttggtatcagcaaaagcctggtcaagcgccgcgtctgttgatttatggcgcgttttcgcgcgcgactggcattccggaccgattttctggttctggttctggcactgatttcactctgaccatttcacgcctggaaccggaggattttgcggtgtactattgccaacaatatggctcatcgccgtggacgtttggccaaggtactaaagttgagattaaattcaaagcggaggctgacaaggccgctgcagcaaaagctgactcctttatgaacgcgggttacaaaaacttcatgaccgaggtaaataatctcaataaacgtatgggtgatctgcgcgacactaatggggatgcaggcgcatgggcacgcattatgtctggtgcaggttcggcggatggcgggtattctgacaattacactcatgttcaggtgggcttcgataaaaaacatgagctggacggtgtggatctgttcactggcgtaaccatgacttatactgattcaagcgcagacagccacgcattttcaggtaaaacgaaatcagttggcggcggtctgtatgcgagcgcactgttcgagagcggcgcctacattgatctaattggcaagtatattcaccatgataatgattacacagggaactttgcaggcctgggcaccaaacactataacacgcattcatggtacgctggcgcagaaaccggctatagataccacctgaccgaggaaacctttatcgaaccgcaagcggaactggtttacggtgcggtcagtggcaagacctttcgttggaaagatggtgatatggatctgtcaatgaaaaaccgcgacttcagccccttgatcggccgcaccggcattgagctgggcaaaaccttctctggcaaagattggtctgttaccgcgcgtgcgggcacttcgtggcaatttgatctgctaaacaacggtgagactgtactgcgtgatgcgagtggcgaaaaacgtattaaaggtgaaaaagatagtagaatgctattcaacgtgggcatgaatgcgcagatcaaagataacatgcgttttgggttggagtttgaaaaatccgcgttcggtaaatataatgttgacaatgctgtgaacgcgaatttccgctacatgttttaa

SEQ ID NO: 830 - DNA, 1821 bp, Artificial Sequence
  Description of Artificial Sequence: Synthetic polynucleotide
atgaacaaagtatatagcctgaaatattgcccagtaactgggggtctgattgtagtcagtgaactggcatcccgcgtcatcaaaaaaacctgccgtcgtctgactcacatcctgctggcgggtattccggctgtgtatctgtactacccgcagatctcccaggcaggtatcgtccgcgaaattgtactgacccagtcgcctggtaccctgtctctgtcgccgggtgaacgtgctaccctgtcttgtcgtgcttcgcaatcggttggctcgtcttatctggcatggtatcagcaaaaaccgggccaagcgcctcgtctgctgatttatggcgcgttttctcgtgctacgggcattcctgatcgtttttcgggctctggctctggtactgattttacgctgactatcagccgcttggaacctgaagattttgcggtttattattgccaacaatatggctcttctccgtggacgtttggtcaaggcactaaagttgaaattaaaggtggtggctcgggcggtggttctggtggtggtagtggtggtggtcaagtgcagttggttgaatcgggtggcggtgttgtgcagccgggccgttcgttgcgtctgtcttgcgcagcgagtggtttcaccttctcttcttatactatgcactgggtgcgtcaagcacctggcaaaggtctggagtgggtaacttttatttcatacgatggtaataataaatattatgcagattctgttaaaggtcgctttacgatttctcgcgataattcaaaaaatacgctgtatctgcagatgaattcgctgcgcgctgaggatactgcgatctactattgtgcgcgtactggttggctgggtccgtttgattactggggccaaggtacgctggttacagtttcgtcgttcaaagcggaggctgacaaggccgctgcagcaaaagctgactcctttatgaacgcgggttacaaaaacttcatgaccgaggtaaataatctcaataaacgtatgggtgatctgcgcgacactaatggggatgcaggcgcatgggcacgcattatgtctggtgcaggttcggcggatggcgggtattctgacaattacactcatgttcaggtgggcttcgataaaaaacatgagctggacggtgtggatctgttcactggcgtaaccatgacttatactgattcaagcgcagacagccacgcattttcaggtaaaacgaaatcagttggcggcggtctgtatgcgagcgcactgttcgagagcggcgcctacattgatctaattggcaagtatattcaccatgataatgattacacagggaactttgcaggcctgggcaccaaacactataacacgcattcatggtacgctggcgcagaaaccggctatagataccacctgaccgaggaaacctttatcgaaccgcaagcggaactggtttacggtgcggtcagtggcaagacctttcgttggaaagatggtgatatggatctgtcaatgaaaaaccgcgacttcagccccttgatcggccgcaccggcattgagctgggcaaaaccttctctggcaaagattggtctgttaccgcgcgtgcgggcacttcgtggcaatttgatctgctaaacaacggtgagactgtactgcgtgatgcgagtggcgaaaaacgtattaaaggtgaaaaagatagtagaatgctattcaacgtgggcatgaatgcgcagatcaaagataacatgcgttttgggttggagtttgaaaaatccgcgttcggtaaatataatgttgacaatgctgtgaacgcgaatttccgctacatgttttaa

SEQ ID NO: 831 - DNA, 1803 bp, Artificial Sequence
  Description of Artificial Sequence: Synthetic polynucleotide
atgaacaaagtatatagcctgaaatattgcccagtaactgggggtctgattgtagtcagtgaactggcatcccgcgtcatcaaaaaaacctgccgtcgtctgactcacatcctgctggcgggtattccggctgtgtatctgtactacccgcagatctcccaggcaggtatcgtccgccaagtacaactggttgaatccggcggaggagtggtgcaaccgggccgcagtttgcgtctggattgtaaagcttcaggcatcactttttctaattctggtatgcactgggttcgccaagctccgggtaaaggtctggagtgggttgcggtgatctggtatgatggttctaaacgatattatgcggatagtgttaagggtcgttttactatttctcgtgataattctaagaacaccttgtttctgcagatgaatagtctgcgcgctgaggatactgcggtatattattgtgcgactaatgacgattattggggccaaggcacgctggttaccgtgagctctggtggtggttcgggtggtggttctggtggtgggagcggcggtggcgagatcgttctgactcaaagcccggcgactctgagtctgagtccgggtgaacgtgcgactctgagctgccgtgcgtctcagagtgtgtcgagttatctggcgtggtaccaacaaaaaccgggccaggcgccgcgactgctgatttatgatgcttctaatcgtgcgactggtattccggcgcgctttagcggttctggctcaggcactgacttcactctgactatttcttcgctggaaccggaagattttgcggtgtactattgtcaacaatcatctaattggcctcgtacgttcggtcaaggtacaaaagtggagataaaattcaaagcggaggctgacaaggccgctgcagcaaaagctgactcctttatgaacgcgggttacaaaaacttcatgaccgaggtaaataatctcaataaacgtatgggtgatctgcgcgacactaatggggatgcaggcgcatgggcacgcattatgtctggtgcaggttcggcggatggcgggtattctgacaattacactcatgttcaggtgggcttcgataaaaaacatgagctggacggtgtggatctgttcactggcgtaaccatgacttatactgattcaagcgcagacagccacgcattttcaggtaaaacgaaatcagttggcggcggtctgtatgcgagcgcactgttcgagagcggcgcctacattgatctaattggcaagtatattcaccatgataatgattacacagggaactttgcaggcctgggcaccaaacactataacacgcattcatggtacgctggcgcagaaaccggctatagataccacctgaccgaggaaacctttatcgaaccgcaagcggaactggtttacggtgcggtcagtggcaagacctttcgttggaaagatggtgatatggatctgtcaatgaaaaaccgcgacttcagccccttgatcggccgcaccggcattgagctgggcaaaaccttctctggcaaagattggtctgttaccgcgcgtgcgggcacttcgtggcaatttgatctgctaaacaacggtgagactgtactgcgtgatgcgagtggcgaaaaacgtattaaaggtgaaaaagatagtagaatgctattcaacgtgggcatgaatgcgcagatcaaagataacatgcgttttgggttggagtttgaaaaatccgcgttcggtaaatataatgttgacaatgctgtgaacgcgaatttccgctacatgttttaa

SEQ ID NO: 832 - DNA, 1803 bp, Artificial Sequence
  Description of Artificial Sequence: Synthetic polynucleotide
atgaacaaagtatatagcctgaaatattgcccagtaactgggggtctgattgtagtcagtgaactggcatcccgcgtcatcaaaaaaacctgccgtcgtctgactcacatcctgctggcgggtattccggctgtgtatctgtactacccgcagatctcccaggcaggtatcgtccgcgaaatcgtgctgactcagagtccggcgactctgtctctgagtccgggcgaacgcgcgactctgtcttgccgtgcgtctcaatctgtgtcttcatacttggcttggtaccaacaaaaaccgggccaggcgccgcgactgttgatttatgatgcgtcgaatcgcgcgactggcattccggcgcgcttttcgggtagcggttctggtactgattttacgctgactatctcttctctggagcctgaagatttcgctgtttattactgccaacagtctagtaattggccgcgtactttcggccagggcactaaggtggaaattaaaggtggcggctcgggcggcggctcgggtggtggttctggtggtggccaagtgcaactggtggaaagtggcggcggggtggtgcaaccgggccgttctctgcgcctggattgtaaagcttcaggcattacttttagcaactctggtatgcactgggttcgccaagctccgggcaaaggcctggaatgggtggcggttatttggtacgatggctctaaacgttattacgctgacagtgttaaaggccgctttaccatttctcgtgataattctaaaaataccctgtttctgcaaatgaactcgctgcgcgcggaagatactgctgtttactattgtgcgactaatgatgattactggggtcaaggtaccctggttaccgtgtcttctttcaaagcggaggctgacaaggccgctgcagcaaaagctgactcctttatgaacgcgggttacaaaaacttcatgaccgaggtaaataatctcaataaacgtatgggtgatctgcgcgacactaatggggatgcaggcgcatgggcacgcattatgtctggtgcaggttcggcggatggcgggtattctgacaattacactcatgttcaggtgggcttcgataaaaaacatgagctggacggtgtggatctgttcactggcgtaaccatgacttatactgattcaagcgcagacagccacgcattttcaggtaaaacgaaatcagttggcggcggtctgtatgcgagcgcactgttcgagagcggcgcctacattgatctaattggcaagtatattcaccatgataatgattacacagggaactttgcaggcctgggcaccaaacactataacacgcattcatggtacgctggcgcagaaaccggctatagataccacctgaccgaggaaacctttatcgaaccgcaagcggaactggtttacggtgcggtcagtggcaagacctttcgttggaaagatggtgatatggatctgtcaatgaaaaaccgcgacttcagccccttgatcggccgcaccggcattgagctgggcaaaaccttctctggcaaagattggtctgttaccgcgcgtgcgggcacttcgtggcaatttgatctgctaaacaacggtgagactgtactgcgtgatgcgagtggcgaaaaacgtattaaaggtgaaaaagatagtagaatgctattcaacgtgggcatgaatgcgcagatcaaagataacatgcgttttgggttggagtttgaaaaatccgcgttcggtaaatataatgttgacaatgctgtgaacgcgaatttccgctacatgttttaa

SEQ ID NO: 833 - DNA, 1821 bp, Artificial Sequence
  Description of Artificial Sequence: Synthetic polynucleotide
atgaacaaagtatatagcctgaaatattgcccagtaactgggggtctgattgtagtcagtgaactggcatcccgcgtcatcaaaaaaacctgccgtcgtctgactcacatcctgctggcgggtattccggctgtgtatctgtactacccgcagatctcccaggcaggtatcgtccgcgatattcaaatgactcaatctccgagctctctgagtgcgtctgtgggtgatcgtgtgactattacttgtcgtgcgtctcaagatgtttcaactgcggttgcgtggtatcaacagaaaccgggcaaggcgcctaagctgctgatttattctgcttcgttcctgtacagcggtgtgccgtctcgtttctctggctctggttcgggtactgatttcactctgactatttcgagtctgcagccggaagattttgcgacttattattgtcaacaatatctgtatcaccctgcgacgtttggtcaaggcacgaaagttgaaattaaacgtggtggtggctctggtggtggcagcggtggtgggtcgggtggcggtgaagttcaactggttgagtcaggtggtggcctggtgcaaccgggcggctctctgcgcctgtcttgtgctgcgtcgggttttacgttctctgatagctggattcactgggtacgccaggcaccgggcaaaggtctggaatgggtagcttggatttcaccttatggtggctctacttattacgcggatagcgtgaaaggtcgctttactatttctgcggacactagcaaaaatactgcttacctgcaaatgaattcgctgcgtgctgaggatactgcagtgtattactgtgcgcgtcgtcattggcctggcggctttgattattggggtcaaggtactctggttactgttagcagcttcaaagcggaggctgacaaggccgctgcagcaaaagctgactcctttatgaacgcgggttacaaaaacttcatgaccgaggtaaataatctcaataaacgtatgggtgatctgcgcgacactaatggggatgcaggcgcatgggcacgcattatgtctggtgcaggttcggcggatggcgggtattctgacaattacactcatgttcaggtgggcttcgataaaaaacatgagctggacggtgtggatctgttcactggcgtaaccatgacttatactgattcaagcgcagacagccacgcattttcaggtaaaacgaaatcagttggcggcggtctgtatgcgagcgcactgttcgagagcggcgcctacattgatctaattggcaagtatattcaccatgataatgattacacagggaactttgcaggcctgggcaccaaacactataacacgcattcatggtacgctggcgcagaaaccggctatagataccacctgaccgaggaaacctttatcgaaccgcaagcggaactggtttacggtgcggtcagtggcaagacctttcgttggaaagatggtgatatggatctgtcaatgaaaaaccgcgacttcagccccttgatcggccgcaccggcattgagctgggcaaaaccttctctggcaaagattggtctgttaccgcgcgtgcgggcacttcgtggcaatttgatctgctaaacaacggtgagactgtactgcgtgatgcgagtggcgaaaaacgtattaaaggtgaaaaagatagtagaatgctattcaacgtgggcatgaatgcgcagatcaaagataacatgcgttttgggttggagtttgaaaaatccgcgttcggtaaatataatgttgacaatgctgtgaacgcgaatttccgctacatgttttaa

SEQ ID NO: 834 - DNA, 1821 bp, Artificial Sequence
  Description of Artificial Sequence: Synthetic polynucleotide
atgaacaaagtatatagcctgaaatattgcccagtaactgggggtctgattgtagtcagtgaactggcatcccgcgtcatcaaaaaaacctgccgtcgtctgactcacatcctgctggcgggtattccggctgtgtatctgtactacccgcagatctcccaggcaggtatcgtccgcgaagtgcagctggtggagtcaggtggaggcttggtgcaaccgggcggttcactgcgtctgtcatgtgcggcgtctgggtttacttttagtgactcttggattcactgggtgcgccaggctccgggtaaaggcctggaatgggtagcttggattagtccttacggtggctcgacctattatgctgattcggtaaagggtcgctttactattagcgctgatacttctaaaaatactgcatacctgcagatgaatagcctgcgcgctgaggatactgctgtgtattattgcgcgcgtcgccactggccgggcggctttgattattggggccaaggtactctggttaccgtgtctagtggcggtggtagcggcggcggctcaggtggcggctcgggcggtggcgacattcagatgactcagtctccgtcttctttgtcggcgagcgtgggcgatcgtgttaccatcacgtgtcgcgcgagccaagatgtgtcgactgcggtggcttggtatcaacaaaaaccgggtaaagctccgaaactgctgatttatagtgcgtcttttttgtattctggtgttccgtctcgtttctctggctcaggtagcggtactgattttacgctgactatttcttcactgcaaccggaagattttgctacgtattattgtcaacaatatctgtatcacccggcgacgtttggtcagggtactaaggtggagataaaacgcttcaaagcggaggctgacaaggccgctgcagcaaaagctgactcctttatgaacgcgggttacaaaaacttcatgaccgaggtaaataatctcaataaacgtatgggtgatctgcgcgacactaatggggatgcaggcgcatgggcacgcattatgtctggtgcaggttcggcggatggcgggtattctgacaattacactcatgttcaggtgggcttcgataaaaaacatgagctggacggtgtggatctgttcactggcgtaaccatgacttatactgattcaagcgcagacagccacgcattttcaggtaaaacgaaatcagttggcggcggtctgtatgcgagcgcactgttcgagagcggcgcctacattgatctaattggcaagtatattcaccatgataatgattacacagggaactttgcaggcctgggcaccaaacactataacacgcattcatggtacgctggcgcagaaaccggctatagataccacctgaccgaggaaacctttatcgaaccgcaagcggaactggtttacggtgcggtcagtggcaagacctttcgttggaaagatggtgatatggatctgtcaatgaaaaaccgcgacttcagccccttgatcggccgcaccggcattgagctgggcaaaaccttctctggcaaagattggtctgttaccgcgcgtgcgggcacttcgtggcaatttgatctgctaaacaacggtgagactgtactgcgtgatgcgagtggcgaaaaacgtattaaaggtgaaaaagatagtagaatgctattcaacgtgggcatgaatgcgcagatcaaagataacatgcgttttgggttggagtttgaaaaatccgcgttcggtaaatataatgttgacaatgctgtgaacgcgaatttccgctacatgttttaa

SEQ ID NO: 835 - DNA, 885 bp, Artificial Sequence
  Description of Artificial Sequence: Synthetic polynucleotide
atgcaggtacaattagttgagagcggcggcggtgtggttcaaccgggccgtagtctgcgattgtcttgtgctgcatctggttttactttcagttcttacacgatgcactgggttcgccaagctccgggcaaaggcctggagtgggttacctttatttcttacgatggcaataataagtattacgctgattctgtgaaaggtcgctttactattagccgagataactctaaaaatactctgtatctgcaaatgaattctctgcgtgcggaagatactgcgatctattattgtgcgcgtactggttggctgggcccgtttgattattggggccaaggcacgctggttactgttagttcgggcggcggttctggtggcggctctggtggtggctctggcggcggcgagattgtgctgactcaatctccgggcacgctgtcactgtctccgggtgaacgcgcgaccctgtcttgtcgcgcgagtcaaagtgttggttcttcttatctggcttggtatcagcaaaagcctggtcaagcgccgcgtctgttgatttatggcgcgttttcgcgcgcgactggcattccggaccgattttctggttctggttctggcactgatttcactctgaccatttcacgcctggaaccggaggattttgcggtgtactattgccaacaatatggctcatcgccgtggacgtttggccaaggtactaaagttgagattaaacttaatccattaattaatgaaatcagcaaaatcatttcagctgcaggtaattttgatgttaaagaggaaagagctgcagcttctttattgcagttgtccggtaatgccagtgatttttcatatggacggaactcaataactttgacagcatcagcataa

SEQ ID NO: 836 - DNA, 885 bp, Artificial Sequence
  Description of Artificial Sequence: Synthetic polynucleotide
atggaaattgtactgacccagtcgcctggtaccctgtctctgtcgccgggtgaacgtgctaccctgtcttgtcgtgcttcgcaatcggttggctcgtcttatctggcatggtatcagcaaaaaccgggccaagcgcctcgtctgctgatttatggcgcgttttctcgtgctacgggcattcctgatcgtttttcgggctctggctctggtactgattttacgctgactatcagccgcttggaacctgaagattttgcggtttattattgccaacaatatggctcttctccgtggacgtttggtcaaggcactaaagttgaaattaaaggtggtggctcgggcggtggttctggtggtggtagtggtggtggtcaagtgcagttggttgaatcgggtggcggtgttgtgcagccgggccgttcgttgcgtctgtcttgcgcagcgagtggtttcaccttctcttcttatactatgcactgggtgcgtcaagcacctggcaaaggtctggagtgggtaacttttatttcatacgatggtaataataaatattatgcagattctgttaaaggtcgctttacgatttctcgcgataattcaaaaaatacgctgtatctgcagatgaattcgctgcgcgctgaggatactgcgatctactattgtgcgcgtactggttggctgggtccgtttgattactggggccaaggtacgctggttacagtttcgtcgcttaatccattaattaatgaaatcagcaaaatcatttcagctgcaggtaattttgatgttaaagaggaaagagctgcagcttctttattgcagttgtccggtaatgccagtgatttttcatatggacggaactcaataactttgacagcatcagcataa

SEQ ID NO: 837 - DNA, 867 bp, Artificial Sequence
  Description of Artificial Sequence: Synthetic polynucleotide
atgcaagtacaactggttgaatccggcggaggagtggtgcaaccgggccgcagtttgcgtctggattgtaaagcttcaggcatcactttttctaattctggtatgcactgggttcgccaagctccgggtaaaggtctggagtgggttgcggtgatctggtatgatggttctaaacgatattatgcggatagtgttaagggtcgttttactatttctcgtgataattctaagaacaccttgtttctgcagatgaatagtctgcgcgctgaggatactgcggtatattattgtgcgactaatgacgattattggggccaaggcacgctggttaccgtgagctctggtggtggttcgggtggtggttctggtggtgggagcggcggtggcgagatcgttctgactcaaagcccggcgactctgagtctgagtccgggtgaacgtgcgactctgagctgccgtgcgtctcagagtgtgtcgagttatctggcgtggtaccaacaaaaaccgggccaggcgccgcgactgctgatttatgatgcttctaatcgtgcgactggtattccggcgcgctttagcggttctggctcaggcactgacttcactctgactatttcttcgctggaaccggaagattttgcggtgtactattgtcaacaatcatctaattggcctcgtacgttcggtcaaggtacaaaagtggagataaaacttaatccattaattaatgaaatcagcaaaatcatttcagctgcaggtaattttgatgttaaagaggaaagagctgcagcttctttattgcagttgtccggtaatgccagtgatttttcatatggacggaactcaataactttgacagcatcagcataa

SEQ ID NO: 838 - DNA, 867 bp, Artificial Sequence
  Description of Artificial Sequence: Synthetic polynucleotide
atggaaatcgtgctgactcagagtccggcgactctgtctctgagtccgggcgaacgcgcgactctgtcttgccgtgcgtctcaatctgtgtcttcatacttggcttggtaccaacaaaaaccgggccaggcgccgcgactgttgatttatgatgcgtcgaatcgcgcgactggcattccggcgcgcttttcgggtagcggttctggtactgattttacgctgactatctcttctctggagcctgaagatttcgctgtttattactgccaacagtctagtaattggccgcgtactttcggccagggcactaaggtggaaattaaaggtggcggctcgggcggcggctcgggtggtggttctggtggtggccaagtgcaactggtggaaagtggcggcggggtggtgcaaccgggccgttctctgcgcctggattgtaaagcttcaggcattacttttagcaactctggtatgcactgggttcgccaagctccgggcaaaggcctggaatgggtggcggttatttggtacgatggctctaaacgttattacgctgacagtgttaaaggccgctttaccatttctcgtgataattctaaaaataccctgtttctgcaaatgaactcgctgcgcgcggaagatactgctgtttactattgtgcgactaatgatgattactggggtcaaggtaccctggttaccgtgtcttctcttaatccattaattaatgaaatcagcaaaatcatttcagctgcaggtaattttgatgttaaagaggaaagagctgcagcttctttattgcagttgtccggtaatgccagtgatttttcatatggacggaactcaataactttgacagcatcagcataa

SEQ ID NO: 839 - DNA, 885 bp, Artificial Sequence
  Description of Artificial Sequence: Synthetic polynucleotide
atggatattcaaatgactcaatctccgagctctctgagtgcgtctgtgggtgatcgtgtgactattacttgtcgtgcgtctcaagatgtttcaactgcggttgcgtggtatcaacagaaaccgggcaaggcgcctaagctgctgatttattctgcttcgttcctgtacagcggtgtgccgtctcgtttctctggctctggttcgggtactgatttcactctgactatttcgagtctgcagccggaagattttgcgacttattattgtcaacaatatctgtatcaccctgcgacgtttggtcaaggcacgaaagttgaaattaaacgtggtggtggctctggtggtggcagcggtggtgggtcgggtggcggtgaagttcaactggttgagtcaggtggtggcctggtgcaaccgggcggctctctgcgcctgtcttgtgctgcgtcgggttttacgttctctgatagctggattcactgggtacgccaggcaccgggcaaaggtctggaatgggtagcttggatttcaccttatggtggctctacttattacgcggatagcgtgaaaggtcgctttactatttctgcggacactagcaaaaatactgcttacctgcaaatgaattcgctgcgtgctgaggatactgcagtgtattactgtgcgcgtcgtcattggcctggcggctttgattattggggtcaaggtactctggttactgttagcagccttaatccattaattaatgaaatcagcaaaatcatttcagctgcaggtaattttgatgttaaagaggaaagagctgcagcttctttattgcagttgtccggtaatgccagtgatttttcatatggacggaactcaataactttgacagcatcagcataa

SEQ ID NO: 840 - DNA, 885 bp, Artificial Sequence
  Description of Artificial Sequence: Synthetic polynucleotide
atggaagtgcagctggtggagtcaggtggaggcttggtgcaaccgggcggttcactgcgtctgtcatgtgcggcgtctgggtttacttttagtgactcttggattcactgggtgcgccaggctccgggtaaaggcctggaatgggtagcttggattagtccttacggtggctcgacctattatgctgattcggtaaagggtcgctttactattagcgctgatacttctaaaaatactgcatacctgcagatgaatagcctgcgcgctgaggatactgctgtgtattattgcgcgcgtcgccactggccgggcggctttgattattggggccaaggtactctggttaccgtgtctagtggcggtggtagcggcggcggctcaggtggcggctcgggcggtggcgacattcagatgactcagtctccgtcttctttgtcggcgagcgtgggcgatcgtgttaccatcacgtgtcgcgcgagccaagatgtgtcgactgcggtggcttggtatcaacaaaaaccgggtaaagctccgaaactgctgatttatagtgcgtcttttttgtattctggtgttccgtctcgtttctctggctcaggtagcggtactgattttacgctgactatttcttcactgcaaccggaagattttgctacgtattattgtcaacaatatctgtatcacccggcgacgtttggtcagggtactaaggtggagataaaacgccttaatccattaattaatgaaatcagcaaaatcatttcagctgcaggtaattttgatgttaaagaggaaagagctgcagcttctttattgcagttgtccggtaatgccagtgatttttcatatggacggaactcaataactttgacagcatcagcataa

SEQ ID NO: 841 - DNA, 159 bp, Artificial Sequence; identical to SEQ ID NO: 394
  Description of Artificial Sequence: Synthetic polynucleotide

SEQ ID NO: 842 - DNA, 2124 bp, Artificial Sequence
  Description of Artificial Sequence: Synthetic polynucleotide
atggattcttgtcataaaattgattatgggttatacgccctggagattttagcccaataccataacgtctctgttaacccggaagaaattaaacatagatttgacacagacgggactggtctgggattaacgtcatggttgcttgctgcgaaatctttagaactaaaggtaaaacaggtaaaaaaaacaattgaccgattaaactttatttctttgcccgcattagtctggagagaggatggacgtcattttattctgactaaagtcagtaaagaagcaaacagatatcttatttttgatctggagcaacgaaatccccgtgttctcgaacagtctgagtttgaggcgttatatcaggggcatattattcttattgcttcccgttcttctgttaccgggaaactggcaaaatttgactttacctggtttatccctgccattataaaatacagaaaaatatttattgaaacccttgttgtatctgtttttttacaattatttgcattaataaccccccttttttttcaggtggttatggacaaagtattagtacacagggggttttcaacccttaatgttattactgtcgcattatctgttgtggtggtgtttgagattatactcagcggtttaagaacttacatttttgcacatagtacaagtcggattgatgttgagttgggtgccaaactcttccggcatttactggcgctaccgatctcttattttgagagtcgtcgtgttggtgatactgttgccagggtaagagaattagaccagatccgtaattttctgacaggacaggcattaacatctgttctggacttattattttcattcatattttttgcggtaatgtggtattacagcccaaagcttactctggtgatcttattttcgctgccctgttatgctgcatggtctgtttttattagccccattttgcgacgtcgccttgatgataagttttcacggaatgcggataatcaatctttcctggtggaatcagtcacggcgattaacactataaaagctatggcagtctcacctcagatgacgaacatatgggacaaacaattggcaggatatgttgctgcaggctttaaagtgacagtattagccaccattggtcaacaaggaatacagttaatacaaaagactgttatgatcatcaacctgtggttgggagcacacctggttatttccggggatttaagtattggtcagttaattgcttttaatatgcttgctggtcagattgttgcaccggttattcgccttgcacaaatctggcaggatttccagcaggttggtatatcagttacccgccttggtgatgtgcttaactctccaactgaaagttatcatgggaaactggcattaccggaaattaatggtaatatcacttttcgtaatatccggtttcgctataagcctgactctccggttattttagataatatcaatctcagtattaagcagggggaggttattggtattgtcggacgttctggttcaggaaaaagcacattaactaaattaattcaacgtttttatattcctgaaaatggccaggtcttaattgatggacatgatcttgcgttggccgatcctaactggttacgtcgtcaggtgggggttgtgttgcaggacaatgtgctgcttaatcgcagtattattgataatatctcactggctaatcctggtatgtccgtcgaaaaagttatttatgcagcgaaattagcaggcgctcatgattttatttctgaattgcgtgaggggtataacaccattgtcggggaacagggggcaggattatccggaggtcaacgtcaacgcatcgcaattgcaagggcgctggtgaacaaccctaaaatacttatttttgatgaagcaaccagtgctctggattatgagtcggagcatatcatcatgcgcaatatgcacaaaatatgtaagggcagaacggttataatcattgctcatcgtctgtctacagtaaaaaatgcagaccgcattattgtcatggaaaaagggaaaattgttgaacagggtaaacataaggaactgctttctgaaccggaaagtttatacagttacttatatcagttacagtcagactaa

SEQ ID NO: 843 - DNA, 1437 bp, Artificial Sequence
  Description of Artificial Sequence: Synthetic polynucleotide
atgaaaacatggttaatggggttcagcgagttcctgttgcgctataaacttgtctggagtgaaacatggaaaatccggaagcaattagatactccggtacgtgaaaaggacgaaaatgaattcttacccgctcatctggaattaattgaaacgccggtatccagacggccgcgtctggttgcttattttattatggggtttctggttattgctgtcattttatctgttttaggtcaggtggaaattgttgccactgcaaatgggaaattaacactaagtgggcgcagcaaagaaattaaacctattgaaaactcaatagttaaagaaattatcgtaaaagaaggagagtcagtccggaaaggggatgtgttattaaagcttacagcactgggagctgaagctgatacgttaaaaacacagtcatcactgttacagaccaggctggaacaaactcggtatcaaattctgagcaggtcaattgaattaaataaactacctgaactgaagcttcctgatgagccttattttcagaatgtatctgaagaggaagtactgcgtttaacttctttgataaaagaacagttttccacatggcaaaatcagaagtatcaaaaagaactgaatctggataagaaaagagcagagcgattaacaatacttgcccgtataaaccgttatgaaaatttatcgagagttgaaaaaagccgtctggatgatttcaggagtttattgcataaacaggcaattgcaaaacatgctgtacttgagcaggagaataaatatgtcgaggcagcaaatgaattacgggtttataaatcgcaactggagcaaattgagagtgagatattgtctgcaaaagaagaatatcagcttgtcacgcagctttttaaaaatgaaattttagacaagctaagacaaacaacagacaacattgagttattaactctggagttagagaaaaatgaagagcgtcaacaggcttcagtaatcagggcccctgtttcgggaaaagttcagcaactgaaggttcatactgaaggtggggttgttacaacagcggaaacactgatggtcatcgttccggaagatgacacgctggaggttactgctctggtacaaaataaagatattggttttattaacgtcgggcagaatgccatcattaaagtggaggcctttccttacacccgatatggttatctggtgggtaaggtgaaaaatataaatttagatgcaatagaagaccagaaactgggactcgtttttaatgtcattgtttctgttgaagagaatgatttgtcaaccgggaataagcacattccattaagctcgggtatggctgtcactgcagaaataaagactggaatgcgaagcgtaatcagctatcttcttagtcctctggaagagtctgtaacagaaagtttacatgagcgttaa

SEQ ID NO: 844 - protein, 119 aa, Artificial Sequence
  Description of Artificial Sequence: Synthetic polypeptide
MQVQLVESGGGVVQPGRSLRLSCAASGFTFSSYTMHWVRQAPGKGLEWVTFISYDGNNKYYADSVKGRFTISRDNSKNTLYLQMNSLRAEDTAIYYCARTGWLGPFDYWGQGTLVTVSS

SEQ ID NO: 845 - protein, 108 aa, Artificial Sequence
  Description of Artificial Sequence: Synthetic polypeptide
EIVLTQSPGTLSLSPGERATLSCRASQSVGSSYLAWYQQKPGQAPRLLIYGAFSRATGIPDRFSGSGSGTDFTLTISRLEPEDFAVYYCQQYGSSPWTFGQGTKVEIK

SEQ ID NO: 846 - protein, 114 aa, Artificial Sequence
  Description of Artificial Sequence: Synthetic polypeptide
MQVQLVESGGGVVQPGRSLRLDCKASGITFSNSGMHWVRQAPGKGLEWVAVIWYDGSKRYYADSVKGRFTISRDNSKNTLFLQMNSLRAEDTAVYYCATNDDYWGQGTLVTVSS

SEQ ID NO: 847 - protein, 107 aa, Artificial Sequence [sequence omitted]

SEQ ID NO: 848 - protein, 109 aa, Artificial Sequence
  Description of Artificial Sequence: Synthetic polypeptide
MDIQMTQSPSSLSASVGDRVTITCRASQDVSTAVAWYQQKPGKAPKLLIYSASFLYSGVPSRFSGSGSGTDFTLTISSLQPEDFATYYCQQYLYHPATFGQGTKVEIKR

SEQ ID NO: 849 - protein, 118 aa, Artificial Sequence [sequence omitted]

SEQ ID NO: 850 - protein, 15 aa, Artificial Sequence
  Description of Artificial Sequence: Synthetic peptide
GGGSGGGSGGGSGGG

SEQ ID NO: 851 - protein, 59 aa, Artificial Sequence
  Description of Artificial Sequence: Synthetic polypeptide
MNKVYSLKYCPVTGGLIVVSELASRVIKKTCRRLTHILLAGIPAVYLYYPQISQAGIVR

SEQ ID NO: 852 - protein, 162 aa, Artificial Sequence
  Description of Artificial Sequence: Synthetic polypeptide
FKAEADKAAAAKADSFMNAGYKNFMTEVNNLNKRMGDLRDTNGDAGAWARIMSGAGSADGGYSDNYTHVQVGFDKKHELDGVDLFTGVTMTYTDSSADSHAFSGKTKSVGGGLYASALFESGAYIDLIGKYIHHDNDYTGNFAGLGTKHYNTHSWYAGAETG

SEQ ID NO: 853 - protein, 52 aa, Artificial Sequence; identical to SEQ ID NO: 393
  Description of Artificial Sequence: Synthetic polypeptide

SEQ ID NO: 854 - protein, 707 aa, Artificial Sequence
  Description of Artificial Sequence: Synthetic polypeptide
MDSCHKIDYGLYALEILAQYHNVSVNPEEIKHRFDTDGTGLGLTSWLLAAKSLELKVKQVKKTIDRLNFISLPALVWREDGRHFILTKVSKEANRYLIFDLEQRNPRVLEQSEFEALYQGHIILIASRSSVTGKLAKFDFTWFIPAIIKYRKIFIETLVVSVFLQLFALITPLFFQVVMDKVLVHRGFSTLNVITVALSVVVVFEIILSGLRTYIFAHSTSRIDVELGAKLFRHLLALPISYFESRRVGDTVARVRELDQIRNFLTGQALTSVLDLLFSFIFFAVMWYYSPKLTLVILFSLPCYAAWSVFISPILRRRLDDKFSRNADNQSFLVESVTAINTIKAMAVSPQMTNIWDKQLAGYVAAGFKVTVLATIGQQGIQLIQKTVMIINLWLGAHLVISGDLSIGQLIAFNMLAGQIVAPVIRLAQIWQDFQQVGISVTRLGDVLNSPTESYHGKLALPEINGNITFRNIRFRYKPDSPVILDNINLSIKQGEVIGIVGRSGSGKSTLTKLIQRFYIPENGQVLIDGHDLALADPNWLRRQVGVVLQDNVLLNRSIIDNISLANPGMSVEKVIYAAKLAGAHDFISELREGYNTIVGEQGAGLSGGQRQRIAIARALVNNPKILIFDEATSALDYESEHIIMRNMHKICKGRTVIIIAHRLSTVKNADRIIVMEKGKIVEQGKHKELLSEPESLYSYLYQLQSD

SEQ ID NO: 855 - protein, 478 aa, Artificial Sequence
  Description of Artificial Sequence: Synthetic polypeptide
MKTWLMGFSEFLLRYKLVWSETWKIRKQLDTPVREKDENEFLPAHLELIETPVSRRPRLVAYFIMGFLVIAVILSVLGQVEIVATANGKLTLSGRSKEIKPIENSIVKEIIVKEGESVRKGDVLLKLTALGAEADTLKTQSSLLQTRLEQTRYQILSRSIELNKLPELKLPDEPYFQNVSEEEVLRLTSLIKEQFSTWQNQKYQKELNLDKKRAERLTILARINRYENLSRVEKSRLDDFRSLLHKQAIAKHAVLEQENKYVEAANELRVYKSQLEQIESEILSAKEEYQLVTQLFKNEILDKLRQTTDNIELLTLELEKNEERQQASVIRAPVSGKVQQLKVHTEGGVVTTAETLMVIVPEDDTLEVTALVQNKDIGFINVGQNAIIKVEAFPYTRYGYLVGKVKNINLDAIEDQKLGLVFNVIVSVEENDLSTGNKHIPLSSGMAVTAEIKTGMRSVISYLLSPLEESVTESLHER

SEQ ID NO: 856-893 - skipped (38 entries)

SEQ ID NO: 894 - DNA, 138 bp, Artificial Sequence
  Description of Artificial Sequence: Synthetic polynucleotide
tgacggcgattgagccgacgggtggaaacccaaaacgtaatcaacgtgggtactccttaaattgggttcgaatggaccatggcacaagtcattaataccaacagcctctcgctgatcactcaaaataatatcaacaag

SEQ ID NO: 895 - DNA, 70 bp, Artificial Sequence
  Description of Artificial Sequence: Synthetic oligonucleotide
tgacggcgattgagccgacgggtggaaacccaaaacgtaatcaactacgaacacttacaggaggtaccca

SEQ ID NO: 896 - DNA, 70 bp, Artificial Sequence
  Description of Artificial Sequence: Synthetic oligonucleotide
tgacggcgattgagccgacgggtggaaacccaaaacgtaatcaacaagtataaactctgggaggttccta

SEQ ID NO: 897 - DNA, 70 bp, Artificial Sequence
  Description of Artificial Sequence: Synthetic oligonucleotide
tgacggcgattgagccgacgggtggaaacccaaaacgtaatcaactcaaatcccttaataaggaggtaaa

SEQ ID NO: 898 - DNA, 106 bp, Artificial Sequence
  Description of Artificial Sequence: Synthetic polynucleotide
ctctagaaataattttgtttaactttaagaaggagatatacatatgaaacaaagcactattgcactggcactcttaccgttactgtttacccctgtgacaaaagcg

SEQ ID NO: 899 - DNA, 63 bp, Artificial Sequence
  Description of Artificial Sequence: Synthetic oligonucleotide
atgaaacaaagcactattgcactggcactcttaccgttactgtttacccctgtgacaaaagcg

SEQ ID NO: 900 - DNA, 109 bp, Artificial Sequence
  Description of Artificial Sequence: Synthetic polynucleotide
ctctagaaataattttgtttaactttaagaaggagatatacatatgatgaagcgcaatattctggcagtgatcgtccctgctctgttagtagcaggtactgcaaacgct

SEQ ID NO: 901 - DNA, 66 bp, Artificial Sequence
  Description of Artificial Sequence: Synthetic oligonucleotide
atgatgaagcgcaatattctggcagtgatcgtccctgctctgttagtagcaggtactgcaaacgct

SEQ ID NO: 902 - DNA, 88 bp, Artificial Sequence
  Description of Artificial Sequence: Synthetic oligonucleotide
ctctagaaataattttgtttaactttaagaaggagatatacatatgagaactctgactctaaatgaattagattctgtttctggtggt

SEQ ID NO: 903 - DNA, 45 bp, Artificial Sequence
  Description of Artificial Sequence: Synthetic oligonucleotide
atgagaactctgactctaaatgaattagattctgtttctggtggt

SEQ ID NO: 904 - DNA, 88 bp, Artificial Sequence
  Description of Artificial Sequence: Synthetic oligonucleotide
gacgccagagagttaagggggttaaatgaaacaatcgaccatcgcattggcgctgcttcctctattgttcacaccggtgacaaaggca

SEQ ID NO: 905 - DNA, 63 bp, Artificial Sequence
  Description of Artificial Sequence: Synthetic oligonucleotide
atgaaacaatcgaccatcgcattggcgctgcttcctctattgttcacaccggtgacaaaggca

SEQ ID NO: 906 - DNA, 160 bp, Artificial Sequence
  Description of Artificial Sequence: Synthetic polynucleotide
ctctagaaataattttgtttaactttaagaaggagatatacatatgaacaataacgatctctttcaggcatcacgtcggcgttttctggcacaactcggcggcttaaccgtcgccgggatgctggggccgtcattgttaacgccgcgacgtgcgactgcg

SEQ ID NO: 907 - DNA, 117 bp, Artificial Sequence
  Description of Artificial Sequence: Synthetic polynucleotide
atgaacaataacgatctctttcaggcatcacgtcggcgttttctggcacaactcggcggcttaaccgtcgccgggatgctggggccgtcattgttaacgccgcgacgtgcgactgcg

SEQ ID NO: 908 - DNA, 148 bp, Artificial Sequence
  Description of Artificial Sequence: Synthetic polynucleotide
cccacattcgaggtactaaatgaacaataacgatctctttcaggcatcacgtcggcgttttctggcacaactcggcggcttaaccgtcgccgggatgctggggacgtcattgttaacgccgcgccgtgcgactgcggcgcaagcggcg

SEQ ID NO: 909 - DNA, 129 bp, Artificial Sequence
  Description of Artificial Sequence: Synthetic polynucleotide
atgaacaataacgatctctttcaggcatcacgtcggcgttttctggcacaactcggcggcttaaccgtcgccgggatgctggggacgtcattgttaacgccgcgccgtgcgactgcggcgcaagcggcg

SEQ ID NO: 910 - DNA, 130 bp, Artificial Sequence
  Description of Artificial Sequence: Synthetic polynucleotide
accctattacacacctaaggaggccaaatacatggacgtcagtcgcagacaattttttaaaatctgcgcgggcggtatggcgggaacaacagtagcagcattgggctttgccccgaagcaagcactggct

SEQ ID NO: 911 - DNA, 99 bp, Artificial Sequence
  Description of Artificial Sequence: Synthetic oligonucleotide
atggacgtcagtcgcagacaattttttaaaatctgcgcgggcggtatggcgggaacaacagtagcagcattgggctttgccccgaagcaagcactggct

SEQ ID NO: 912 - DNA, 168 bp, Artificial Sequence
  Description of Artificial Sequence: Synthetic polynucleotide
tacgcaaaaaacataatttaagagaggataaacatgaaaacgaaaatccctgatgcggtattggctgctgaggtgagtcgccgtggtttggtaaaaacgacagcgatcggcggcctggcaatggccagcagcgcattaacattaccttttagtcggattgcgcacgct

SEQ ID NO: 913 - DNA, 135 bp, Artificial Sequence
  Description of Artificial Sequence: Synthetic polynucleotide
atgaaaacgaaaatccctgatgcggtattggctgctgaggtgagtcgccgtggtttggtaaaaacgacagcgatcggcggcctggcaatggccagcagcgcattaacattaccttttagtcggattgcgcacgct

SEQ ID NO: 914 - DNA, 712 bp, Artificial Sequence
  Description of Artificial Sequence: Synthetic polynucleotide
gaattcgttaagacccactttcacatttaagttgtttttctaatccgcatatgatcaattcaaggccgaataagaaggctggctctgcaccttggtgatcaaataattcgatagcttgtcgtaataatggcggcatactatcagtagtaggtgtttccctttcttctttagcgacttgatgctcttgatcttccaatacgcaacctaaagtaaaatgccccacagcgctgagtgcatataatgcattctctagtgaaaaaccttgttggcataaaaaggctaattgattttcgagagtttcatactgtttttctgtaggccgtgtacctaaatgtacttttgctccatcgcgatgacttagtaaagcacatctaaaacttttagcgttattacgtaaaaaatcttgccagctttccccttctaaagggcaaaagtgagtatggtgcctatctaacatctcaatggctaaggcgtcgagcaaagcccgcttattttttacatgccaatacaatgtaggctgctctacacctagcttctgggcgagtttacgggttgttaaaccttcgattccgacctcattaagcagctctaatgcgctgttaatcactttacttttatctaatctagacatcattaattcctaatttttgttgacactctatcattgatagagttattttaccactccctatcagtgatagagaaaagtgaa

SEQ ID NO: 915 - DNA, 104 bp, Artificial Sequence; identical to SEQ ID NO: 801
  Description of Artificial Sequence: Synthetic polynucleotide

SEQ ID NO: 916 - DNA, 162 bp, Artificial Sequence
  Description of Artificial Sequence: Synthetic polynucleotide
ggtaccagttgttcttattggtggtgttgctttatggttgcatcgtagtaaatggttgtaacaaaagcaatttttccggctgtctgtatacaaaaacgccgcaaagtttgagcgaagtcaataaactctctacccattcagggcaatatctctcttggatcc

SEQ ID NO: 917 - DNA, 358 bp, Artificial Sequence
  Description of Artificial Sequence: Synthetic polynucleotide
cacatttccccgaaaagtgccgatggccccccgatggtagtgtggcccatgcgagagtagggaactgccaggcatcaaataaaacgaaaggctcagtcgaaagactgggcctttcgttttatctgttgtttgtcggtgaacgctctcctgagtaggacaaatccgccgggagcggatttgaacgttgcgaagcaacggcccggagggtggcgggcaggacgcccgccataaactgccaggcatcaaattaagcagaaggccatcctgacggatggcctttttgcgtggccagtgccaagcttgcatgcagattgcagcattacacgtcttgagcgattgtgtaggctggagctgcttc

SEQ ID NO: 918 - DNA, 48 bp, Artificial Sequence
  Description of Artificial Sequence: Synthetic oligonucleotide
gaagttcctatactttctagagaataggaacttcggaataggaacttc

SEQ ID NO: 919 - DNA, 1345 bp, Artificial Sequence
  Description of Artificial Sequence: Synthetic polynucleotide
aagatcccctcacgctgccgcaagcactcagggcgcaagggctgctaaaggaagcggaacacgtagaaagccagtccgcagaaacggtgctgaccccggatgaatgtcagctactgggctatctggacaagggaaaacgcaagcgcaaagagaaagcaggtagcttgcagtgggcttacatggcgatagctagactgggcggttttatggacagcaagcgaaccggaattgccagctggggcgccctctggtaaggttgggaagccctgcaaagtaaactggatggctttcttgccgccaaggatctgatggcgcaggggatcaagatctgatcaagagacaggatgaggatcgtttcgcatgattgaacaagatggattgcacgcaggttctccggccgcttgggtggagaggctattcggctatgactgggcacaacagacaatcggctgctctgatgccgccgtgttccggctgtcagcgcaggggcgcccggttctttttgtcaagaccgacctgtccggtgccctgaatgaactgcaggacgaggcagcgcggctatcgtggctggccacgacgggcgttccttgcgcagctgtgctcgacgttgtcactgaagcgggaagggactggctgctattgggcgaagtgccggggcaggatctcctgtcatctcaccttgctcctgccgagaaagtatccatcatggctgatgcaatgcggcggctgcatacgcttgatccggctacctgcccattcgaccaccaagcgaaacatcgcatcgagcgagcacgtactcggatggaagccggtcttgtcgatcaggatgatctggacgaagagcatcaggggctcgcgccagccgaactgttcgccaggctcaaggcgcgcatgcccgacggcgaggatctcgtcgtgacccatggcgatgcctgcttgccgaatatcatggtggaaaatggccgcttttctggattcatcgactgtggccggctgggtgtggcggaccgctatcaggacatagcgttggctacccgtgatattgctgaagagcttggcggcgaatgggctgaccgcttcctcgtgctttacggtatcgccgctcccgattcgcagcgcatcgccttctatcgccttcttgacgagttcttctgagcgggactctggggttcgaaatgaccgaccaagcgacgcccaacctgccatcacgagatttcgattccaccgccgccttctatgaaaggttgggcttcggaatcgttttccgggacgccggctggatgatcctccagcgcggggatctcatgctggagttcttcgcccaccccagcttcaaaagcgctct

SEQ ID NO: 920 - protein, 219 aa, Artificial Sequence
  Description of Artificial Sequence: Synthetic polypeptide
MMKRNILAVIVPALLVAGTANARNLPVATPDPGMFPCLHHSQNLLRAVSNMLQKARQTLEFYPCTSEEIDHEDITKDKTSTVEACLPLELTKNESCLNSRETSFITNGSCLASRKTSFMMALCLSSIYEDLKMYQVEFKTMNAKLLMDPKRQIFLDQNMLAVIDELMQALNFNSETVPQKSSLEEPDFYKTKIKLCILLHAFRIRAVTIDRVMSYLNAS

SEQ ID NO: 921 - protein, 218 aa, Artificial Sequence
  Description of Artificial Sequence: Synthetic polypeptide
MKQSTIALALLPLLFTPVTKARNLPVATPDPGMFPCLHHSQNLLRAVSNMLQKARQTLEFYPCTSEEIDHEDITKDKTSTVEACLPLELTKNESCLNSRETSFITNGSCLASRKTSFMMALCLSSIYEDLKMYQVEFKTMNAKLLMDPKRQIFLDQNMLAVIDELMQALNFNSETVPQKSSLEEPDFYKTKIKLCILLHAFRIRAVTIDRVMSYLNAS

SEQ ID NO: 922 - protein, 236 aa, Artificial Sequence
  Description of Artificial Sequence: Synthetic polypeptide
MNNNDLFQASRRRFLAQLGGLTVAGMLGPSLLTPRRATARNLPVATPDPGMFPCLHHSQNLLRAVSNMLQKARQTLEFYPCTSEEIDHEDITKDKTSTVEACLPLELTKNESCLNSRETSFITNGSCLASRKTSFMMALCLSSIYEDLKMYQVEFKTMNAKLLMDPKRQIFLDQNMLAVIDELMQALNFNSETVPQKSSLEEPDFYKTKIKLCILLHAFRIRAVTIDRVMSYLNAS

SEQ ID NO: 923 - protein, 328 aa, Artificial Sequence
  Description of Artificial Sequence: Synthetic polypeptide
MMKRNILAVIVPALLVAGTANAIWELKKDVYVVELDWYPDAPGEMVVLTCDTPEEDGITWTLDQSSEVLGSGKTLTIQVKEFGDAGQYTCHKGGEVLSHSLLLLHKKEDGIWSTDILKDQKEPKNKTFLRCEAKNYSGRFTCWWLTTISTDLTFSVKSSRGSSDPQGVTCGAATLSAERVRGDNKEYEYSVECQEDSACPAAEESLPIEVMVDAVHKLKYENYTSSFFIRDIIKPDPPKNLQLKPLKNSRQVEVSWEYPDTWSTPHSYFSLTFCVQVQGKSKREKKDRVFTDKTSATVICRKNASISVRAQDRYYSSSWSEWASVPCS

SEQ ID NO: 924 - protein, 327 aa, Artificial Sequence
  Description of Artificial Sequence: Synthetic polypeptide
MKQSTIALALLPLLFTPVTKAIWELKKDVYVVELDWYPDAPGEMVVLTCDTPEEDGITWTLDQSSEVLGSGKTLTIQVKEFGDAGQYTCHKGGEVLSHSLLLLHKKEDGIWSTDILKDQKEPKNKTFLRCEAKNYSGRFTCWWLTTISTDLTFSVKSSRGSSDPQGVTCGAATLSAERVRGDNKEYEYSVECQEDSACPAAEESLPIEVMVDAVHKLKYENYTSSFFIRDIIKPDPPKNLQLKPLKNSRQVEVSWEYPDTWSTPHSYFSLTFCVQVQGKSKREKKDRVFTDKTSATVICRKNASISVRAQDRYYSSSWSEWASVPCS

SEQ ID NO: 925 - protein, 345 aa, Artificial Sequence
  Description of Artificial Sequence: Synthetic polypeptide
MNNNDLFQASRRRFLAQLGGLTVAGMLGPSLLTPRRATAIWELKKDVYVVELDWYPDAPGEMVVLTCDTPEEDGITWTLDQSSEVLGSGKTLTIQVKEFGDAGQYTCHKGGEVLSHSLLLLHKKEDGIWSTDILKDQKEPKNKTFLRCEAKNYSGRFTCWWLTTISTDLTFSVKSSRGSSDPQGVTCGAATLSAERVRGDNKEYEYSVECQEDSACPAAEESLPIEVMVDAVHKLKYENYTSSFFIRDIIKPDPPKNLQLKPLKNSRQVEVSWEYPDTWSTPHSYFSLTFCVQVQGKSKREKKDRVFTDKTSATVICRKNASISVRAQDRYYSSSWSEWASVPCS

SEQ ID NO: 926 - protein, 219 aa, Artificial Sequence; identical to SEQ ID NO: 920
  Description of Artificial Sequence: Synthetic polypeptide

SEQ ID NO: 927 - protein, 218 aa, Artificial Sequence; identical to SEQ ID NO: 921
  Description of Artificial Sequence: Synthetic polypeptide

SEQ ID NO: 928 - protein, 236 aa, Artificial Sequence; identical to SEQ ID NO: 922
  Description of Artificial Sequence: Synthetic polypeptide

SEQ ID NO: 929 - protein, 335 aa, Artificial Sequence
  Description of Artificial Sequence: Synthetic polypeptide
MMKRNILAVIVPALLVAGTANAMWELEKDVYVVEVDWTPDAPGETVNLTCDTPEEDDITWTSDQRHGVIGSGKTLTITVKEFLDAGQYTCHKGGETLSHSHLLLHKKENGIWSTEILKNFKNKTFLKCEAPNYSGRFTCSWLVQRNMDLKFNIKSSSSSPDSRAVTCGMASLSAEKVTLDQRDYEKYSVSCQEDVTCPTAEETLPIELALEARQQNKYENYSTSFFIRDIIKPDPPKNLQMKPLKNSQVEVSWEYPDSWSTPHSYFSLKFFVRIQRKKEKMKETEEGCNQKGAFLVEKTSTEVQCKGGNVCVQAQDRYYNSSCSKWACVPCRVRS

SEQ ID NO: 930 - protein, 334 aa, Artificial Sequence
  Description of Artificial Sequence: Synthetic polypeptide
MKQSTIALALLPLLFTPVTKAMWELEKDVYVVEVDWTPDAPGETVNLTCDTPEEDDITWTSDQRHGVIGSGKTLTITVKEFLDAGQYTCHKGGETLSHSHLLLHKKENGIWSTEILKNFKNKTFLKCEAPNYSGRFTCSWLVQRNMDLKFNIKSSSSSPDSRAVTCGMASLSAEKVTLDQRDYEKYSVSCQEDVTCPTAEETLPIELALEARQQNKYENYSTSFFIRDIIKPDPPKNLQMKPLKNSQVEVSWEYPDSWSTPHSYFSLKFFVRIQRKKEKMKETEEGCNQKGAFLVEKTSTEVQCKGGNVCVQAQDRYYNSSCSKWACVPCRVRS

SEQ ID NO: 931 - protein, 352 aa, Artificial Sequence
  Description of Artificial Sequence: Synthetic polypeptide
MNNNDLFQASRRRFLAQLGGLTVAGMLGPSLLTPRRATAMWELEKDVYVVEVDWTPDAPGETVNLTCDTPEEDDITWTSDQRHGVIGSGKTLTITVKEFLDAGQYTCHKGGETLSHSHLLLHKKENGIWSTEILKNFKNKTFLKCEAPNYSGRFTCSWLVQRNMDLKFNIKSSSSSPDSRAVTCGMASLSAEKVTLDQRDYEKYSVSCQEDVTCPTAEETLPIELALEARQQNKYENYSTSFFIRDIIKPDPPKNLQMKPLKNSQVEVSWEYPDSWSTPHSYFSLKFFVRIQRKKEKMKETEEGCNQKGAFLVEKTSTEVQCKGGNVCVQAQDRYYNSSCSKWACVPCRVRS

SEQ ID NO: 932 - protein, 149 aa, Artificial Sequence
  Description of Artificial Sequence: Synthetic polypeptide
MMKRNILAVIVPALLVAGTANAAPARSPSPSTQPWEHVNAIQEARRLLNLSRDTAAEMNETVEVISEMFDLQEPTCLQTRLELYKQGLRGSLTKLKGPLTMMASHYKQHCPPTPETSCATQIITFESFKENLKDFLLVIPFDCWEPVQE

SEQ ID NO: 933 - protein, 148 aa, Artificial Sequence
  Description of Artificial Sequence: Synthetic polypeptide
MKQSTIALALLPLLFTPVTKAAPARSPSPSTQPWEHVNAIQEARRLLNLSRDTAAEMNETVEVISEMFDLQEPTCLQTRLELYKQGLRGSLTKLKGPLTMMASHYKQHCPPTPETSCATQIITFESFKENLKDFLLVIPFDCWEPVQE

SEQ ID NO: 934 - protein, 166 aa, Artificial Sequence
  Description of Artificial Sequence: Synthetic polypeptide
MNNNDLFQASRRRFLAQLGGLTVAGMLGPSLLTPRRATAAPARSPSPSTQPWEHVNAIQEARRLLNLSRDTAAEMNETVEVISEMFDLQEPTCLQTRLELYKQGLRGSLTKLKGPLTMMASHYKQHCPPTPETSCATQIITFESFKENLKDFLLVIPFDCWEPVQE

SEQ ID NO: 935 - protein, 136 aa, Artificial Sequence
  Description of Artificial Sequence: Synthetic polypeptide
MMKRNILAVIVPALLVAGTANANWVNVISDLKKIEDLIQSMHIDATLYTESDVHPSCKVTAMKCFLLELQVISLESGDASIHDTVENLIILANNSLSSNGNVTESGCKECEELEEKNIKEFLQSFVHIVQMFINTS

SEQ ID NO: 936 - protein, 135 aa, Artificial Sequence
  Description of Artificial Sequence: Synthetic polypeptide
MKQSTIALALLPLLFTPVTKANWVNVISDLKKIEDLIQSMHIDATLYTESDVHPSCKVTAMKCFLLELQVISLESGDASIHDTVENLIILANNSLSSNGNVTESGCKECEELEEKNIKEFLQSFVHIVQMFINTS

SEQ ID NO: 937 - protein, 153 aa, Artificial Sequence
  Description of Artificial Sequence: Synthetic polypeptide
MNNNDLFQASRRRFLAQLGGLTVAGMLGPSLLTPRRATANWVNVISDLKKIEDLIQSMHIDATLYTESDVHPSCKVTAMKCFLLELQVISLESGDASIHDTVENLIILANNSLSSNGNVTESGCKECEELEEKNIKEFLQSFVHIVQMFINTS

SEQ ID NO: 938 - protein, 199 aa, Artificial Sequence
  Description of Artificial Sequence: Synthetic polypeptide
MMKRNILAVIVPALLVAGTANAGPQREEFPRDLSLISPLAQAVRSSSRTPSDKPVAHVVANPQAEGQLQWLNRRANALLANGVELRDNQLVVPSEGLYLIYSQVLFKGQGCPSTHVLLTHTISRIAVSYQTKVNLLSAIKSPCQRETPEGAEAKPWYEPIYLGGVFQLEKGDRLSAEINRPDYLDFAESGQVYFGIIAL

SEQ ID NO: 939 - protein, 198 aa, Artificial Sequence
  Description of Artificial Sequence: Synthetic polypeptide
MKQSTIALALLPLLFTPVTKAGPQREEFPRDLSLISPLAQAVRSSSRTPSDKPVAHVVANPQAEGQLQWLNRRANALLANGVELRDNQLVVPSEGLYLIYSQVLFKGQGCPSTHVLLTHTISRIAVSYQTKVNLLSAIKSPCQRETPEGAEAKPWYEPIYLGGVFQLEKGDRLSAEINRPDYLDFAESGQVYFGIIAL

SEQ ID NO: 940 - protein, 216 aa, Artificial Sequence
  Description of Artificial Sequence: Synthetic polypeptide
MNNNDLFQASRRRFLAQLGGLTVAGMLGPSLLTPRRATAGPQREEFPRDLSLISPLAQAVRSSSRTPSDKPVAHVVANPQAEGQLQWLNRRANALLANGVELRDNQLVVPSEGLYLIYSQVLFKGQGCPSTHVLLTHTISRIAVSYQTKVNLLSAIKSPCQRETPEGAEAKPWYEPIYLGGVFQLEKGDRLSAEINRPDYLDFAESGQVYFGIIAL

SEQ ID NO: 941 - protein, 160 aa, Artificial Sequence
  Description of Artificial Sequence: Synthetic polypeptide
MMKRNILAVIVPALLVAGTANAQDPYVKEAENLKKYFNAGHSDVADNGTLFLGILKNWKEESDRKIMQSQIVSFYFKLFKNFKDDQSIQKSVETIKEDMNVKFFNSNKKKRDDFEKLTNYSVTDLNVQRKAIHELIQVMAELSPAAKTGKRKRSQMLFRG

SEQ ID NO: 942 - protein, 159 aa, Artificial Sequence
  Description of Artificial Sequence: Synthetic polypeptide
MKQSTIALALLPLLFTPVTKAQDPYVKEAENLKKYFNAGHSDVADNGTLFLGILKNWKEESDRKIMQSQIVSFYFKLFKNFKDDQSIQKSVETIKEDMNVKFFNSNKKKRDDFEKLTNYSVTDLNVQRKAIHELIQVMAELSPAAKTGKRKRSQMLFRG

SEQ ID NO: 943 - protein, 177 aa, Artificial Sequence
  Description of Artificial Sequence: Synthetic polypeptide
MNNNDLFQASRRRFLAQLGGLTVAGMLGPSLLTPRRATAQDPYVKEAENLKKYFNAGHSDVADNGTLFLGILKNWKEESDRKIMQSQIVSFYFKLFKNFKDDQSIQKSVETIKEDMNVKFFNSNKKKRDDFEKLTNYSVTDLNVQRKAIHELIQVMAELSPAAKTGKRKRSQMLFRG

SEQ ID NO: 944-952 - skipped (9 entries)

SEQ ID NO: 953 - DNA, 657 bp, Artificial Sequence
  Description of Artificial Sequence: Synthetic polynucleotide
atgaaacagagcacaattgctctggccttgttgccattactgtttacccctgttactaaggctaggaacctgcctgtggcaacaccagaccctgggatgttcccttgcttacatcattcccagaacctgttgcgtgcggtgtctaacatgctgcagaaagccaggcagacgctggaattctacccatgcacttccgaagagatagatcatgaagacattacgaaagacaaaacctcaacggttgaagcatgcttacctctggaattgactaagaatgaatcgtgcttaaactcaagagagaccagtttcatcactaatggctcttgcttagcgtcgcgcaagaccagcttcatgatggcgctctgcctaagtagcatctacgaggacctcaaaatgtaccaagttgaatttaaaactatgaatgccaaacttctaatggacccaaaaagacagatatttttagatcagaatatgcttgcggttattgacgaactcatgcaggcattgaattttaattccgagacggtgccacaaaaaagttctttggaggagccggacttttacaagacaaaaatcaagctgtgcatacttcttcacgcattcagaatacgggccgttacgatcgatcgcgtcatgtcgtatcttaatgcgagctga

SEQ ID NO: 954 - DNA, 987 bp, Artificial Sequence
  Description of Artificial Sequence: Synthetic polynucleotide
atgaagcagagcacgatcgcattggcgttgctaccgctgttgtttaccccggtcacaaaagccatctgggaactgaaaaaagatgtttatgtagttgaactggattggtacccggatgcacccggtgagatggtggttttgacctgcgacacgccggaagaagatggcataacgtggaccctggatcaaagctctgaagttctgggttcaggtaagacattgacgatccaagtaaaagaatttggcgacgcaggtcagtacacctgccacaaaggtggcgaagttctgtcgcactcactcctgctcctgcacaaaaaagaggatggcatctggagtactgatatcctaaaggatcaaaaagaacctaaaaacaaaacgttcttgcgctgtgaagcgaagaactatagtggtcgctttacgtgctggtggttgactaccatttccaccgatttgaccttttctgttaagagttcgcgcggctcgtcagatccgcagggcgttacttgcggtgcggcgacgctgtcagctgagagagttcgtggggacaacaaagagtacgaatatagtgtagaatgtcaagaggattcggcgtgcccggcagcagaggagtctctccccattgaagttatggtggacgcagtgcataaactgaaatatgagaattacacatcaagcttttttattcgcgatatcatcaaaccggatcctccaaaaaatctgcaactaaagcccctgaaaaattcgcgccaagttgaggtgagctgggaatatccggatacttggtcgacaccgcattcttatttctcactgaccttctgcgttcaggttcaaggtaaatcaaaacgagaaaaaaaggatcgcgtctttaccgacaaaacgtctgctactgtaatctgccgcaagaatgcgtcaatttctgtacgtgcgcaagatcgctactactctagtagttggtctgaatgggcttcagtgccatgctcctgatga

SEQ ID NO: 955 - DNA, 657 bp, Artificial Sequence
  Description of Artificial Sequence: Synthetic polynucleotide
atgaaacagagtacgatagccctagccctgttgccgctcctgttcacccccgttactaaagcacgtaaccttccggtggccacgccagatccgggcatgttcccgtgcttacaccattcccagaatctgctgcgcgctgtgagtaatatgctgcagaaggcgagacaaactttggaattttacccgtgcacttcggaggagattgaccatgaggatatcacaaaagacaaaaccagtacagtggaagcctgcctgccccttgaactgactaaaaatgagagttgtttaaattcacgcgaaaccagcttcattactaacggaagctgcttagcatcgcggaaaaccagttttatgatggccctttgcctttcatctatttacgaggaccttaaaatgtatcaagttgaatttaagactatgaacgcgaaactgctaatggatcccaagcgacaaatctttcttgatcaaaatatgttggctgttattgatgaactgatgcaagccctgaattttaactcagaaaccgtacctcagaaatcgagtttagaagaacccgatttctacaaaactaaaatcaagttgtgtatccttttacatgccttccggattcgggccgtcactattgatcgcgtgatgtcgtacttgaatgcctcctaa

SEQ ID NO: 956 - DNA, 1005 bp, Artificial Sequence
  Description of Artificial Sequence: Synthetic polynucleotide
atgaaacagagcacgatcgcacttgcccttttgccgctgttatttaccccagtgacgaaagccatgtgggaattggaaaaagacgtgtatgttgttgaagttgactggactccggacgcgcctggtgaaactgttaatctgacttgtgatacaccggaggaagatgatataacttggactagcgatcaacgacacggcgtaatcggctctggtaagactttgaccattactgtgaaggaattcttggatgcggggcaatatacgtgtcataaaggcggcgagacgctgtcacactctcacctgttgttacataaaaaagagaatggtatatggtctacggagatcttgaaaaactttaaaaacaaaacttttttgaagtgtgaggctccaaactattctggtcgctttacctgtagttggttggtgcaacgtaacatggatctcaaatttaacataaagtcgtcttcgtcttctcccgatagccgagcggttacctgtggcatggctagtttgtcggcggagaaggtgaccttggatcaacgtgattatgaaaaatatagcgtttcgtgccaagaggacgttacgtgccctaccgctgaagagactttgccgattgaattggcactggaagcacgacaacaaaataaatacgagaattactcaactagtttcttcatccgagatatcataaaaccggaccccccgaagaatctgcaaatgaaaccgcttaaaaattcacaggtagaggtttcgtgggagtacccggatagttggtctacgcctcattcgtattttagcctgaaatttttcgttcgaatacagcgaaaaaaagagaagatgaaagaaactgaagaagggtgtaaccaaaaaggtgcatttctggtggagaaaactagcaccgaggttcaatgcaaaggcggtaacgtgtgcgtacaagctcaagaccgttattataacagtagctgttctaaatgggcttgcgtgccctgccgcgtgagatcatga

SEQ ID NO: 957 - DNA, 408 bp, Artificial Sequence
  Description of Artificial Sequence: Synthetic polynucleotide
atgaagcaatctacgatcgcactagcgttactgccgttattgtttactcctgtgactaaggctaattgggttaatgttatatctgatttgaaaaaaatagaggatctgattcaatcaatgcacatagatgcgactctgtatactgagagcgatgtgcacccgagttgcaaagttactgctatgaaatgttttctgctggagctgcaagttatctctctggagagtggtgatgcgtctattcacgatactgttgagaatctgattattctggctaataactcgctgtcaagtaatgggaatgttacggaatctggctgtaaggagtgtgaagaattagaagaaaaaaatattaaagagtttctgcagagttttgtgcacattgttcagatgtttatcaatactagctga

SEQ ID NO: 958 - DNA, 447 bp, Artificial Sequence
  Description of Artificial Sequence: Synthetic polynucleotide
atgaagcaatctacgatcgcgttggccttactgcccctgttattcacacccgtgaccaaagcggcaccggcccgcagcccatcaccgtcaactcaaccttgggaacatgtaaatgctattcaagaagctcgccgcctgttgaatttgagtcgcgatactgcagcagagatgaatgagactgtagaggtgatttcagaaatgtttgacctgcaggagccgacttgtttgcaaactcgcctggagctgtacaaacaaggcctgcgtggctcgctgactaaactgaaaggtcctctgacgatgatggcttctcattataaacaacactgcccgcctactccggagacgtcttgcgcgacccagataattacttttgaatcttttaaagagaatctgaaagactttctgctggttatcccgtttgattgttgggaaccggttcaagaataa

SEQ ID NO: 959 - DNA, 597 bp, Artificial Sequence
  Description of Artificial Sequence: Synthetic polynucleotide
atgaaacaatcaacgatcgctctggctctgcttccgctgctctttactccagttactaaagcgggtccgcagagggaagaattcccgcgcgatttgagcctgatttcacctcttgctcaggctgtccgctcctcttcgcgtaccccctcggataaacctgtcgcgcacgtggttgcgaacccgcaagcggaagggcagctgcaatggttaaaccgccgggctaatgcactgctggctaatggagttgagttacgcgacaaccaacttgtcgttccttcggaagggctgtatctgatctattcacaggttctctttaaagggcagggttgcccatcaacccacgtgctcctgacacacacgatcagtcgtatcgcggtatcctatcagacgaaagttaacctcctgtcagcgattaaatcgccgtgtcagagagaaactccagagggtgcggaagctaaaccgtggtatgaacctatttatcttggtggagttttccagttggaaaaaggtgatagactgtcggcagagatcaatcgccctgattacctggatttcgctgagtcgggtcaggtttatttcggaattattgcactgtga

SEQ ID NO: 960 - DNA, 480 bp, Artificial Sequence
  Description of Artificial Sequence: Synthetic polynucleotide
atgaagcaatctacgatagcactggcgttgctgccgctgctgttcaccccggttaccaaggcgcaggatccttacgttaaagaagcagagaatctgaaaaaatactttaatgcaggccacagcgatgtggcagataatggcacgttattcctgggcattctgaaaaattggaaagaagaatctgaccggaagatcatgcaatctcagatcgtatcattttatttcaagttgtttaaaaacttcaaggatgaccagtcgattcaaaaatcagtggaaacgatcaaagaagatatgaacgttaagttcttcaactcaaataaaaaaaaacgcgatgatttcgaaaaactgactaattattcggtaactgatttgaatgttcagcgcaaggcgattcatgaattgattcaggttatggcagaactgtcgccagcggcaaaaacgggtaaacgaaaacgttctcagatgttgtttcgtggttga

SEQ ID NO: 961-964 - skipped (4 entries)

SEQ ID NO: 965 - DNA, 2531 bp, Artificial Sequence
  Description of Artificial Sequence: Synthetic polynucleotide
ccaggatacatagattaccacaactccgagcccttccaccttaagacccactttcacatttaagttgtttttctaatccgcatatgatcaattcaaggccgaataagaaggctggctctgcaccttggtgatcaaataattcgatagcttgtcgtaataatggcggcatactatcagtagtaggtgtttccctttcttctttagcgacttgatgctcttgatcttccaatacgcaacctaaagtaaaatgccccacagcgctgagtgcatataatgcattctctagtgaaaaaccttgttggcataaaaaggctaattgattttcgagagtttcatactgtttttctgtaggccgtgtacctaaatgtacttttgctccatcgcgatgacttagtaaagcacatctaaaacttttagcgttattacgtaaaaaatcttgccagctttccccttctaaagggcaaaagtgagtatggtgcctatctaacatctcaatggctaaggcgtcgagcaaagcccgcttattttttacatgccaatacaatgtaggctgctctacacctagcttctgggcgagtttacgggttgttaaaccttcgattccgacctcattaagcagctctaatgcgctgttaatcactttacttttatctaatctagacatcattaattcctaatttttgttgacactctatcattgatagagttattttaccactccctatcagtgatagagaaaagtgaaataagtcataaatagggagtccaaaatgaagcagagcacgatcgcattggcgttgctaccgctgttgtttaccccggtcacaaaagccatctgggaactgaaaaaagatgtttatgtagttgaactggattggtacccggatgcacccggtgagatggtggttttgacctgcgacacgccggaagaagatggcataacgtggaccctggatcaaagctctgaagttctgggttcaggtaagacattgacgatccaagtaaaagaatttggcgacgcaggtcagtacacctgccacaaaggtggcgaagttctgtcgcactcactcctgctcctgcacaaaaaagaggatggcatctggagtactgatatcctaaaggatcaaaaagaacctaaaaacaaaacgttcttgcgctgtgaagcgaagaactatagtggtcgctttacgtgctggtggttgactaccatttccaccgatttgaccttttctgttaagagttcgcgcggctcgtcagatccgcagggcgttacttgcggtgcggcgacgctgtcagctgagagagttcgtggggacaacaaagagtacgaatatagtgtagaatgtcaagaggattcggcgtgcccggcagcagaggagtctctccccattgaagttatggtggacgcagtgcataaactgaaatatgagaattacacatcaagcttttttattcgcgatatcatcaaaccggatcctccaaaaaatctgcaactaaagcccctgaaaaattcgcgccaagttgaggtgagctgggaatatccggatacttggtcgacaccgcattcttatttctcactgaccttctgcgttcaggttcaaggtaaatcaaaacgagaaaaaaaggatcgcgtctttaccgacaaaacgtctgctactgtaatctgccgcaagaatgcgtcaatttctgtacgtgcgcaagatcgctactactctagtagttggtctgaatgggcttcagtgccatgctcctgatgagaaaccctacggaggaggttaatttatgaaacagagcacaattgctctggccttgttgccattactgtttacccctgttactaaggctaggaacctgcctgtggcaacaccagaccctgggatgttcccttgcttacatcattcccagaacctgttgcgtgcggtgtctaacatgctgcagaaagccaggcagacgctggaattctacccatgcacttccgaagagatagatcatgaagacattacgaaagacaaaacctcaacggttgaagcatgcttacctctggaattgactaagaatgaatcgtgcttaaactcaagagagaccagtttcatcactaatggctcttgcttagcgtcgcgcaagaccagcttcatgatggcgctctgcctaagtagcatctacgaggacctcaaaatgtaccaagttgaatttaaaactatgaatgccaaacttctaatggacccaaaaagacagatatttttagatcagaatatgcttgcggttattgacgaactcatgcaggcattgaattttaattccgagacggtgccacaaaaaagttctttggaggagccggacttttacaagacaaaaatcaagctgtgcatacttcttcacgcattcagaatacgggccgttacgatcgatcgcgtcatgtcgtatcttaatgcgagctgaaaataaaacgaaaggctcagtcgaaagactgggcctttcgttttatctgttggttccttatcatctggcgaatcggacccacaagagcactg

SEQ ID NO: 966 - DNA, 2549 bp, Artificial Sequence
  Description of Artificial Sequence: Synthetic polynucleotide
ccaggatacatagattaccacaactccgagcccttccaccttaagacccactttcacatttaagttgtttttctaatccgcatatgatcaattcaaggccgaataagaaggctggctctgcaccttggtgatcaaataattcgatagcttgtcgtaataatggcggcatactatcagtagtaggtgtttccctttcttctttagcgacttgatgctcttgatcttccaatacgcaacctaaagtaaaatgccccacagcgctgagtgcatataatgcattctctagtgaaaaaccttgttggcataaaaaggctaattgattttcgagagtttcatactgtttttctgtaggccgtgtacctaaatgtacttttgctccatcgcgatgacttagtaaagcacatctaaaacttttagcgttattacgtaaaaaatcttgccagctttccccttctaaagggcaaaagtgagtatggtgcctatctaacatctcaatggctaaggcgtcgagcaaagcccgcttattttttacatgccaatacaatgtaggctgctctacacctagcttctgggcgagtttacgggttgttaaaccttcgattccgacctcattaagcagctctaatgcgctgttaatcactttacttttatctaatctagacatcattaattcctaatttttgttgacactctatcattgatagagttattttaccactccctatcagtgatagagaaaagtgaatgttacacatctaaggagaaacattatgaaacagagcacgatcgcacttgcccttttgccgctgttatttaccccagtgacgaaagccatgtgggaattggaaaaagacgtgtatgttgttgaagttgactggactccggacgcgcctggtgaaactgttaatctgacttgtgatacaccggaggaagatgatataacttggactagcgatcaacgacacggcgtaatcggctctggtaagactttgaccattactgtgaaggaattcttggatgcggggcaatatacgtgtcataaaggcggcgagacgctgtcacactctcacctgttgttacataaaaaagagaatggtatatggtctacggagatcttgaaaaactttaaaaacaaaacttttttgaagtgtgaggctccaaactattctggtcgctttacctgtagttggttggtgcaacgtaacatggatctcaaatttaacataaagtcgtcttcgtcttctcccgatagccgagcggttacctgtggcatggctagtttgtcggcggagaaggtgaccttggatcaacgtgattatgaaaaatatagcgtttcgtgccaagaggacgttacgtgccctaccgctgaagagactttgccgattgaattggcactggaagcacgacaacaaaataaatacgagaattactcaactagtttcttcatccgagatatcataaaaccggaccccccgaagaatctgcaaatgaaaccgcttaaaaattcacaggtagaggtttcgtgggagtacccggatagttggtctacgcctcattcgtattttagcctgaaatttttcgttcgaatacagcgaaaaaaagagaagatgaaagaaactgaagaagggtgtaaccaaaaaggtgcatttctggtggagaaaactagcaccgaggttcaatgcaaaggcggtaacgtgtgcgtacaagctcaagaccgttattataacagtagctgttctaaatgggcttgcgtgccctgccgcgtgagatcatgagaagaagattattgaagaggtccgcatgaaacagagtacgatagccctagccctgttgccgctcctgttcacccccgttactaaagcacgtaaccttccggtggccacgccagatccgggcatgttcccgtgcttacaccattcccagaatctgctgcgcgctgtgagtaatatgctgcagaaggcgagacaaactttggaattttacccgtgcacttcggaggagattgaccatgaggatatcacaaaagacaaaaccagtacagtggaagcctgcctgccccttgaactgactaaaaatgagagttgtttaaattcacgcgaaaccagcttcattactaacggaagctgcttagcatcgcggaaaaccagttttatgatggccctttgcctttcatctatttacgaggaccttaaaatgtatcaagttgaatttaagactatgaacgcgaaactgctaatggatcccaagcgacaaatctttcttgatcaaaatatgttggctgttattgatgaactgatgcaagccctgaattttaactcagaaaccgtacctcagaaatcgagtttagaagaacccgatttctacaaaactaaaatcaagttgtgtatccttttacatgccttccggattcgggccgtcactattgatcgcgtgatgtcgtacttgaatgcctcctaaaaataaaacgaaaggctcagtcgaaagactgggcctttcgttttatctgttggttccttatcatctggcgaatcggacccacaagagcactg

SEQ ID NO: 967 - DNA, 1270 bp, Artificial Sequence
  Description of Artificial Sequence: Synthetic polynucleotide
ccaggatacatagattaccacaactccgagcccttccaccttaagacccactttcacatttaagttgtttttctaatccgcatatgatcaattcaaggccgaataagaaggctggctctgcaccttggtgatcaaataattcgatagcttgtcgtaataatggcggcatactatcagtagtaggtgtttccctttcttctttagcgacttgatgctcttgatcttccaatacgcaacctaaagtaaaatgccccacagcgctgagtgcatataatgcattctctagtgaaaaaccttgttggcataaaaaggctaattgattttcgagagtttcatactgtttttctgtaggccgtgtacctaaatgtacttttgctccatcgcgatgacttagtaaagcacatctaaaacttttagcgttattacgtaaaaaatcttgccagctttccccttctaaagggcaaaagtgagtatggtgcctatctaacatctcaatggctaaggcgtcgagcaaagcccgcttattttttacatgccaatacaatgtaggctgctctacacctagcttctgggcgagtttacgggttgttaaaccttcgattccgacctcattaagcagctctaatgcgctgttaatcactttacttttatctaatctagacatcattaattcctaatttttgttgacactctatcattgatagagttattttaccactccctatcagtgatagagaaaagtgaagatcaactcaagataaggaggatccatgaagcaatctacgatcgcactagcgttactgccgttattgtttactcctgtgactaaggctaattgggttaatgttatatctgatttgaaaaaaatagaggatctgattcaatcaatgcacatagatgcgactctgtatactgagagcgatgtgcacccgagttgcaaagttactgctatgaaatgttttctgctggagctgcaagttatctctctggagagtggtgatgcgtctattcacgatactgttgagaatctgattattctggctaataactcgctgtcaagtaatgggaatgttacggaatctggctgtaaggagtgtgaagaattagaagaaaaaaatattaaagagtttctgcagagttttgtgcacattgttcagatgtttatcaatactagctgaaaataaaacgaaaggctcagtcgaaagactgggcctttcgttttatctgttggttccttatcatctggcgaatcggacccacaagagcactg

SEQ ID NO: 968 - DNA, 1309 bp, Artificial Sequence
  Description of Artificial Sequence: Synthetic polynucleotide
ccaggatacatagattaccacaactccgagcccttccaccttaagacccactttcacatttaagttgtttttctaatccgcatatgatcaattcaaggccgaataagaaggctggctctgcaccttggtgatcaaataattcgatagcttgtcgtaataatggcggcatactatcagtagtaggtgtttccctttcttctttagcgacttgatgctcttgatcttccaatacgcaacctaaagtaaaatgccccacagcgctgagtgcatataatgcattctctagtgaaaaaccttgttggcataaaaaggctaattgattttcgagagtttcatactgtttttctgtaggccgtgtacctaaatgtacttttgctccatcgcgatgacttagtaaagcacatctaaaacttttagcgttattacgtaaaaaatcttgccagctttccccttctaaagggcaaaagtgagtatggtgcctatctaacatctcaatggctaaggcgtcgagcaaagcccgcttattttttacatgccaatacaatgtaggctgctctacacctagcttctgggcgagtttacgggttgttaaaccttcgattccgacctcattaagcagctctaatgcgctgttaatcactttacttttatctaatctagacatcattaattcctaatttttgttgacactctatcattgatagagttattttaccactccctatcagtgatagagaaaagtgaagaaagcaacaacatagggggaaagaatgaagcaatctacgatcgcgttggccttactgcccctgttattcacacccgtgaccaaagcggcaccggcccgcagcccatcaccgtcaactcaaccttgggaacatgtaaatgctattcaagaagctcgccgcctgttgaatttgagtcgcgatactgcagcagagatgaatgagactgtagaggtgatttcagaaatgtttgacctgcaggagccgacttgtttgcaaactcgcctggagctgtacaaacaaggcctgcgtggctcgctgactaaactgaaaggtcctctgacgatgatggcttctcattataaacaacactgcccgcctactccggagacgtcttgcgcgacccagataattacttttgaatcttttaaagagaatctgaaagactttctgctggttatcccgtttgattgttgggaaccggttcaagaataaaaataaaacgaaaggctcagtcgaaagactgggcctttcgttttatctgttggttccttatcatctggcgaatcggacccacaagagcactg

SEQ ID NO: 969 - DNA, 1459 bp, Artificial Sequence
  Description of Artificial Sequence: Synthetic polynucleotide
ccaggatacatagattaccacaactccgagcccttccaccttaagacccactttcacatttaagttgtttttctaatccgcatatgatcaattcaaggccgaataagaaggctggctctgcaccttggtgatcaaataattcgatagcttgtcgtaataatggcggcatactatcagtagtaggtgtttccctttcttctttagcgacttgatgctcttgatcttccaatacgcaacctaaagtaaaatgccccacagcgctgagtgcatataatgcattctctagtgaaaaaccttgttggcataaaaaggctaattgattttcgagagtttcatactgtttttctgtaggccgtgtacctaaatgtacttttgctccatcgcgatgacttagtaaagcacatctaaaacttttagcgttattacgtaaaaaatcttgccagctttccccttctaaagggcaaaagtgagtatggtgcctatctaacatctcaatggctaaggcgtcgagcaaagcccgcttattttttacatgccaatacaatgtaggctgctctacacctagcttctgggcgagtttacgggttgttaaaccttcgattccgacctcattaagcagctctaatgcgctgttaatcactttacttttatctaatctagacatcattaattcctaatttttgttgacactctatcattgatagagttattttaccactccctatcagtgatagagaaaagtgaacacaacacagaaaggagggctgtccatgaaacaatcaacgatcgctctggctctgcttccgctgctctttactccagttactaaagcgggtccgcagagggaagaattcccgcgcgatttgagcctgatttcacctcttgctcaggctgtccgctcctcttcgcgtaccccctcggataaacctgtcgcgcacgtggttgcgaacccgcaagcggaagggcagctgcaatggttaaaccgccgggctaatgcactgctggctaatggagttgagttacgcgacaaccaacttgtcgttccttcggaagggctgtatctgatctattcacaggttctctttaaagggcagggttgcccatcaacccacgtgctcctgacacacacgatcagtcgtatcgcggtatcctatcagacgaaagttaacctcctgtcagcgattaaatcgccgtgtcagagagaaactccagagggtgcggaagctaaaccgtggtatgaacctatttatcttggtggagttttccagttggaaaaaggtgatagactgtcggcagagatcaatcgccctgattacctggatttcgctgagtcgggtcaggtttatttcggaattattgcactgtgaaaataaaacgaaaggctcagtcgaaagactgggcctttcgttttatctgttggttccttatcatctggcgaatcggacccacaagagcactg

SEQ ID NO: 970 - DNA, 1342 bp, Artificial Sequence
  Description of Artificial Sequence: Synthetic polynucleotide
ccaggatacatagattaccacaactccgagcccttccaccttaagacccactttcacatttaagttgtttttctaatccgcatatgatcaattcaaggccgaataagaaggctggctctgcaccttggtgatcaaataattcgatagcttgtcgtaataatggcggcatactatcagtagtaggtgtttccctttcttctttagcgacttgatgctcttgatcttccaatacgcaacctaaagtaaaatgccccacagcgctgagtgcatataatgcattctctagtgaaaaaccttgttggcataaaaaggctaattgattttcgagagtttcatactgtttttctgtaggccgtgtacctaaatgtacttttgctccatcgcgatgacttagtaaagcacatctaaaacttttagcgttattacgtaaaaaatcttgccagctttccccttctaaagggcaaaagtgagtatggtgcctatctaacatctcaatggctaaggcgtcgagcaaagcccgcttattttttacatgccaatacaatgtaggctgctctacacctagcttctgggcgagtttacgggttgttaaaccttcgattccgacctcattaagcagctctaatgcgctgttaatcactttacttttatctaatctagacatcattaattcctaatttttgttgacactctatcattgatagagttattttaccactccctatcagtgatagagaaaagtgaacaccaccaccacgaggaggtaaaaaatgaagcaatctacgatagcactggcgttgctgccgctgctgttcaccccggttaccaaggcgcaggatccttacgttaaagaagcagagaatctgaaaaaatactttaatgcaggccacagcgatgtggcagataatggcacgttattcctgggcattctgaaaaattggaaagaagaatctgaccggaagatcatgcaatctcagatcgtatcattttatttcaagttgtttaaaaacttcaaggatgaccagtcgattcaaaaatcagtggaaacgatcaaagaagatatgaacgttaagttcttcaactcaaataaaaaaaaacgcgatgatttcgaaaaactgactaattattcggtaactgatttgaatgttcagcgcaaggcgattcatgaattgattcaggttatggcagaactgtcgccagcggcaaaaacgggtaaacgaaaacgttctcagatgttgtttcgtggttgaaaataaaacgaaaggctcagtcgaaagactgggcctttcgttttatctgttggttccttatcatctggcgaatcggacccacaagagcactg

SEQ ID NO: 971-974 - skipped (4 entries)

SEQ ID NO: 975 - DNA, 5100 bp, Artificial Sequence
  Description of Artificial Sequence: Synthetic polynucleotide
agcgcccaatacgcaaaccgcctctccccgcgcgttggccgattcattaatgcagctggcacgacaggtttcccgactggaaagcgggcagtgagcgcaacgcaattaatgtgagttagctcactcattaggcaccccaggctttacactttatgcttccggctcgtatgttgtgtggaattgtgagcggataacaatttcacacaggaaacagctatgaccatgattacgccaagctatttaggtgacactatagaatactcaagctatgcatcaagcttggtaccgagctcggatccactagtaacggccgccagtgtgctggaattcgcccttttaagacccactttcacatttaagttgtttttctaatccgcagatgatcaattcaaggccgaataagaaggctggctctgcaccttggtgatcaaataattcgatagcttgtcgtaataatggcggcatactatcagtagtaggtgtttccctttcttctttagcgacttgatgctcttgatcttccaatacgcaacctaaagtaaaatgccccacagcgctgagtgcatataatgcattctctagtgaaaaaccttgttggcataaaaaggctaattgattttcgagagtttcatactgtttttctgtaggccgtgtacctaaatgtacttttgctccatcgcgatgacttagtaaagcacatctaaaacttttagcgttattacgtaaaaaatcttgccagctttccccttctaaagggcaaaagtgagtatggtgcctatctaacatctcaatggctaaggcgtcgagcaaagcccgcttattttttacatgccaatacaatgtaggctgctctacacctagcttctgggcgagtttacgggttgttaaaccttcgattccgacctcattaagcagctctaatgcgctgttaatcactttacttttatctaatctagacatcattaattcctaatttttgttgacactctatcattgatagagttattttaccactccctatcagtgatagagaaaagtgaaaggaggtaaattatgcaattggaagttcgcctgttggagagcggtggtggacttgtgaaacccgagggaagccttaaactttcgtgcgttgctagtgggttcacattttcagactatttcatgtcctgggtccgtcaagccccgggaaaaggacttgaatgggttgcccatatttacaccaagagctataactatgccacatactattctggaagcgttaaaggtcgttttaccatttcgcgtgacgacagccgttctatggtgtatttgcagatgaataaccttcgtacagaagatacggctacttactactgtactcgcgatggatcaggctatcccagtttagatttctggggacagggtactcaggttactgtttcaagcggtggaggcggctctggcggtggtgggagtggaggcggtggcagttacgagctgacgcagccaccctcggcaagtgtaaacgtgggcgaaacggtgaaaattacttgttcgggggatcaactgcccaaatacttcgccgattggtttcatcaacgttccgatcagactattttacaagtgatttatgatgataacaaacgtccgtcaggaatcccagagcgtatcagcggatcgagcagcggaacaacagcaactttgaccatccgcgatgtccgtgccgaagacgagggggactactattgtttctctggatacgtggactcagacagcaagctgtatgtttttggctcaggaacacaactgaccgtactgggcaagggcgagctcaattcgaagcttgaaggtaagcctatccctaaccctctcctcggcctcgattctacgcgtaccggtcatcatcaccatcaccattgagcatgcggtctcaggaggaagggcgaattctgcagatatccatcacactggcggccgctcgagcatgcatctagagggcccaattcgccctatagtgagtcgtattacaattcactggccgtcgttttacaacgtcgtgactgggaaaaccctggcgttacccaacttaatcgccttgcagcacatccccctttcgccagctggcgtaatagcgaagaggcccgcaccgatcgcccttcccaacagttgcgcagcctatacgtacggcagtttaaggtttacacctataaaagagagagccgttatcgtctgtttgtggatgtacagagtgatattattgacacgccggggcgacggatggtgatccccctggccagtgcacgtctgctgtcagataaagtctcccgtgaactttacccggtggtgcatatcggggatgaaagctggcgcatgatgaccaccgatatggccagtgtgccggtctccgttatcggggaagaagtggctgatctcagccaccgcgaaaatgacatcaaaaacgccattaacctgatgttctggggaatataaatgtcaggcatgagattatcaaaaaggatcttcacctagatccttttcacgtagaaagccagtccgcagaaacggtgctgaccccggatgaatgtcagctactgggctatctggacaagggaaaacgcaagcgcaaagagaaagcaggtagcttgcagtgggcttacatggcgatagctagactgggcggttttatggacagcaagcgaaccggaattgccagctggggcgccctctggtaaggttgggaagccctgcaaagtaaactggatggctttctcgccgccaaggatctgatggcgcaggggatcaagctctgatcaagagacaggatgaggatcgtttcgcatgattgaacaagatggattgcacgcaggttctccggccgcttgggtggagaggctattcggctatgactgggcacaacagacaatcggctgctctgatgccgccgtgttccggctgtcagcgcaggggcgcccggttctttttgtcaagaccgacctgtccggtgccctgaatgaactgcaagacgaggcagcgcggctatcgtggctggccacgacgggcgttccttgcgcagctgtgctcgacgttgtcactgaagcgggaagggactggctgctattgggcgaagtgccggggcaggatctcctgtcatctcaccttgctcctgccgagaaagtatccatcatggctgatgcaatgcggcggctgcatacgcttgatccggctacctgcccattcgaccaccaagcgaaacatcgcatcgagcgagcacgtactcggatggaagccggtcttgtcgatcaggatgatctggacgaagagcatcaggggctcgcgccagccgaactgttcgccaggctcaaggcgagcatgcccgacggcgaggatctcgtcgtgacccatggcgatgcctgcttgccgaatatcatggtggaaaatggccgcttttctggattcatcgactgtggccggctgggtgtggcggaccgctatcaggacatagcgttggctacccgtgatattgctgaagagcttggcggcgaatgggctgaccgcttcctcgtgctttacggtatcgccgctcccgattcgcagcgcatcgccttctatcgccttcttgacgagttcttctgaattattaacgcttacaatttcctgatgcggtattttctccttacgcatctgtgcggtatttcacaccgcatacaggtggcacttttcggggaaatgtgcgcggaacccctatttgtttatttttctaaatacattcaaatatgtatccgctcatgagacaataaccctgataaatgcttcaataatagcacgtgaggagggccaccatggccaagttgaccagtgccgttccggtgctcaccgcgcgcgacgtcgccggagcggtcgagttctggaccgaccggctcgggttctcccgggacttcgtggaggacgacttcgccggtgtggtccgggacgacgtgaccctgttcatcagcgcggtccaggaccaggtggtgccggacaacaccctggcctgggtgtgggtgcgcggcctggacgagctgtacgccgagtggtcggaggtcgtgtccacgaacttccgggacgcctccgggccggccatgaccgagatcggcgagcagccgtgggggcgggagttcgccctgcgcgacccggccggcaactgcgtgcacttcgtggccgaggagcaggactgacacgtgctaaaacttcatttttaatttaaaaggatctaggtgaagatcctttttgataatctcatgaccaaaatcccttaacgtgagttttcgttccactgagcgtcagaccccgtagaaaagatcaaaggatcttcttgagatcctttttttctgcgcgtaatctgctgcttgcaaacaaaaaaaccaccgctaccagcggtggtttgtttgccggatcaagagctaccaactctttttccgaaggtaactggcttcagcagagcgcagataccaaatactgtccttctagtgtagccgtagttaggccaccacttcaagaactctgtagcaccgcctacatacctcgctctgctaatcctgttaccagtggctgctgccagtggcgataagtcgtgtcttaccgggttggactcaagacgatagttaccggataaggcgcagcggtcgggctgaacggggggttcgtgcacacagcccagcttggagcgaacgacctacaccgaactgagatacctacagcgtgagctatgagaaagcgccacgcttcccgaagggagaaaggcggacaggtatccggtaagcggcagggtcggaacaggagagcgcacgagggagcttccagggggaaacgcctggtatctttatagtcctgtcgggtttcgccacctctgacttgagcgtcgatttttgtgatgctcgtcaggggggcggagcctatggaaaaacgccagcaacgcggcctttttacggttcctgggcttttgctggccttttgctcacatgttctttcctgcgttatcccctgattctgtggataaccgtattaccgcctttgagtgagctgataccgctcgccgcagccgaacgaccgagcgcagcgagtcagtgagcgaggaagcggaag

SEQ ID NO: 976 - DNA, 846 bp, Artificial Sequence
  Description of Artificial Sequence: Synthetic polynucleotide
atgcaattggaagttcgcctgttggagagcggtggtggacttgtgaaacccgagggaagccttaaactttcgtgcgttgctagtgggttcacattttcagactatttcatgtcctgggtccgtcaagccccgggaaaaggacttgaatgggttgcccatatttacaccaagagctataactatgccacatactattctggaagcgttaaaggtcgttttaccatttcgcgtgacgacagccgttctatggtgtatttgcagatgaataaccttcgtacagaagatacggctacttactactgtactcgcgatggatcaggctatcccagtttagatttctggggacagggtactcaggttactgtttcaagcggtggaggcggctctggcggtggtgggagtggaggcggtggcagttacgagctgacgcagccaccctcggcaagtgtaaacgtgggcgaaacggtgaaaattacttgttcgggggatcaactgcccaaatacttcgccgattggtttcatcaacgttccgatcagactattttacaagtgatttatgatgataacaaacgtccgtcaggaatcccagagcgtatcagcggatcgagcagcggaacaacagcaactttgaccatccgcgatgtccgtgccgaagacgagggggactactattgtttctctggatacgtggactcagacagcaagctgtatgtttttggctcaggaacacaactgaccgtactgggcaagggcgagctcaattcgaagcttgaaggtaagcctatccctaaccctctcctcggcctcgattctacgcgtaccggtcatcatcaccatcaccattga

SEQ ID NO: 977 - DNA, 363 bp, Artificial Sequence
  Description of Artificial Sequence: Synthetic polynucleotide
gaagttcgcctgttggagagcggtggtggacttgtgaaacccgagggaagccttaaactttcgtgcgttgctagtgggttcacattttcagactatttcatgtcctgggtccgtcaagccccgggaaaaggacttgaatgggttgcccatatttacaccaagagctataactatgccacatactattctggaagcgttaaaggtcgttttaccatttcgcgtgacgacagccgttctatggtgtatttgcagatgaataaccttcgtacagaagatacggctacttactactgtactcgcgatggatcaggctatcccagtttagatttctggggacagggtactcaggttactgtttcaagc

SEQ ID NO: 978 - DNA, 330 bp, Artificial Sequence
  Description of Artificial Sequence: Synthetic polynucleotide
tacgagctgacgcagccaccctcggcaagtgtaaacgtgggcgaaacggtgaaaattacttgttcgggggatcaactgcccaaatacttcgccgattggtttcatcaacgttccgatcagactattttacaagtgatttatgatgataacaaacgtccgtcaggaatcccagagcgtatcagcggatcgagcagcggaacaacagcaactttgaccatccgcgatgtccgtgccgaagacgagggggactactattgtttctctggatacgtggactcagacagcaagctgtatgtttttggctcaggaacacaactgaccgtactgggc

SEQ ID NO: 979 - DNA, 45 bp, Artificial Sequence
  Description of Artificial Sequence: Synthetic oligonucleotide
ggtggaggcggctctggcggtggtgggagtggaggcggtggcagt

SEQ ID NO: 980 - protein, 281 aa, Artificial Sequence
  Description of Artificial Sequence: Synthetic polypeptide
MQLEVRLLESGGGLVKPEGSLKLSCVASGFTFSDYFMSWVRQAPGKGLEWVAHIYTKSYNYATYYSGSVKGRFTISRDDSRSMVYLQMNNLRTEDTATYYCTRDGSGYPSLDFWGQGTQVTVSSGGGGSGGGGSGGGGSYELTQPPSASVNVGETVKITCSGDQLPKYFADWFHQRSDQTILQVIYDDNKRPSGIPERISGSSSGTTATLTIRDVRAEDEGDYYCFSGYVDSDSKLYVFGSGTQLTVLGKGELNSKLEGKPIPNPLLGLDSTRTGHHHHHH

SEQ ID NO: 981 - DNA, 1668 bp, Artificial Sequence
  Description of Artificial Sequence: Synthetic polynucleotide
ttaagacccactttcacatttaagttgtttttctaatccgcagatgatcaattcaaggccgaataagaaggctggctctgcaccttggtgatcaaataattcgatagcttgtcgtaataatggcggcatactatcagtagtaggtgtttccctttcttctttagcgacttgatgctcttgatcttccaatacgcaacctaaagtaaaatgccccacagcgctgagtgcatataatgcattctctagtgaaaaaccttgttggcataaaaaggctaattgattttcgagagtttcatactgtttttctgtaggccgtgtacctaaatgtacttttgctccatcgcgatgacttagtaaagcacatctaaaacttttagcgttattacgtaaaaaatcttgccagctttccccttctaaagggcaaaagtgagtatggtgcctatctaacatctcaatggctaaggcgtcgagcaaagcccgcttattttttacatgccaatacaatgtaggctgctctacacctagcttctgggcgagtttacgggttgttaaaccttcgattccgacctcattaagcagctctaatgcgctgttaatcactttacttttatctaatctagacataattaattcctaatttttgttgacactctatcattgatagagttattttaccactccctatcagtgatagagaaaagtgaaaggaggtaaattatgactagtaaacaatcgaccatcgcattggcgctgcttcctctattgttcacaccggtgacaaaggcagtcgactataaggatgacgacgacaagcaattgggcggtggcatggaagttcgcctgttggagagcggtggaggacttgtgaagcccgagggaagccttaaactttcgtgcgttgctagtgggttcacattttcagactatttcatgtcctgggtccgtcaagccccgggaaaaggacttgaatgggttgcccatatttacaccaagagctataactatgccacatactattctggaagcgttaaaggtcgttttaccatttcgcgtgacgacagccgttctatggtgtatttgcagatgaataaccttcgtacagaagatacggctacttactactgtactcgcgatggatcaggctatcccagtttagatttctggggacagggtactcaggttactgtttcaagcggtggaggcggctctggcggtggtgggagtggaggcggtggcagttacgagctgacgcagccgccctcggcaagtgtaaacgtgggcgaaacggtgaaaattacttgttcgggggatcaactgcccaaatacttcgccgattggtttcatcaacgttccgatcagactattttacaagtgatttatgatgataacaaacgtccgtcaggaatcccagagcgtatcagcggatcgagcagcggaacaacagcaactttgaccatccgcgatgtccgtgccgaagacgagggggactactattgtttctctggatacgtggactcagacagcaagctgtatgtttttggctcaggaacacaactgaccgtactgggcaagggcgagctcaattcgaagcttgaaggtaagcctatccctaaccctctcctcggactcgattctacgggatccggtcatcatcaccatcaccattga

SEQ ID NO: 982 - protein, 313 aa, Artificial Sequence
  Description of Artificial Sequence: Synthetic polypeptide
KQSTIALALLPLLFTPVTKAVDYKDDDDKQLGGGMEVRLLESGGGLVKPEGSLKLSCVASGFTFSDYFMSWVRQAPGKGLEWVAHIYTKSYNYATYYSGSVKGRFTISRDDSRSMVYLQMNNLRTEDTATYYCTRDGSGYPSLDFWGQGTQVTVSSGGGGSGGGGSGGGGSYELTQPPSASVNVGETVKITCSGDQLPKYFADWFHQRSDQTILQVIYDDNKRPSGIPERISGSSSGTTATLTIRDVRAEDEGDYYCFSGYVDSDSKLYVFGSGTQLTVLGKGELNSKLEGKPIPNPLLGLDSTGSGHHHHHH

SEQ ID NO: 983 - DNA, 1674 bp, Artificial Sequence
  Description of Artificial Sequence: Synthetic polynucleotide
ttaagacccactttcacatttaagttgtttttctaatccgcagatgatcaattcaaggccgaataagaaggctggctctgcaccttggtgatcaaataattcgatagcttgtcgtaataatggcggcatactatcagtagtaggtgtttccctttcttctttagcgacttgatgctcttgatcttccaatacgcaacctaaagtaaaatgccccacagcgctgagtgcatataatgcattctctagtgaaaaaccttgttggcataaaaaggctaattgattttcgagagtttcatactgtttttctgtaggccgtgtacctaaatgtacttttgctccatcgcgatgacttagtaaagcacatctaaaacttttagcgttattacgtaaaaaatcttgccagctttccccttctaaagggcaaaagtgagtatggtgcctatctaacatctcaatggctaaggcgtcgagcaaagcccgcttattttttacatgccaatacaatgtaggctgctctacacctagcttctgggcgagtttacgggttgttaaaccttcgattccgacctcattaagcagctctaatgcgctgttaatcactttacttttatctaatctagacatcattaattcctaatttttgttgacactctatcattgatagagttattttaccactccctatcagtgatagagaaaagtgaaaggaggtaaattatgactagtatgatgaagcgtaacatcttagccgttattgtccccgcattgcttgtggccgggacggctaacgcagtcgactataaggatgacgacgacaagcaattgggcggtggcatggaagttcgcctgttggagagcggtggaggacttgtgaagcccgagggaagccttaaactttcgtgcgttgctagtgggttcacattttcagactatttcatgtcctgggtccgtcaagccccgggaaaaggacttgaatgggttgcccatatttacaccaagagctataactatgccacatactattctggaagcgttaaaggtcgttttaccatttcgcgtgacgacagccgttctatggtgtatttgcagatgaataaccttcgtacagaagatacggctacttactactgtactcgcgatggatcaggctatcccagtttagatttctggggacagggtactcaggttactgtttcaagcggtggaggcggctctggcggtggtgggagtggaggcggtggcagttacgagctgacgcagccgccctcggcaagtgtaaacgtgggcgaaacggtgaaaattacttgttcgggggatcaactgcccaaatacttcgccgattggtttcatcaacgttccgatcagactattttacaagtgatttatgatgataacaaacgtccgtcaggaatcccagagcgtatcagcggatcgagcagcggaacaacagcaactttgaccatccgcgatgtccgtgccgaagacgagggggactactattgtttctctggatacgtggactcagacagcaagctgtatgtttttggctcaggaacacaactgaccgtactgggcaagggcgagctcaattcgaagcttgaaggtaagcctatccctaaccctctcctcggactcgattctacgggatccggtcatcatcaccatcaccattga

SEQ ID NO: 984 - protein, 315 aa, Artificial Sequence
  Description of Artificial Sequence: Synthetic polypeptide
MMKRNILAVIVPALLVAGTANAVDYKDDDDKQLGGGMEVRLLESGGGLVKPEGSLKLSCVASGFTFSDYFMSWVRQAPGKGLEWVAHIYTKSYNYATYYSGSVKGRFTISRDDSRSMVYLQMNNLRTEDTATYYCTRDGSGYPSLDFWGQGTQVTVSSGGGGSGGGGSGGGGSYELTQPPSASVNVGETVKITCSGDQLPKYFADWFHQRSDQTILQVIYDDNKRPSGIPERISGSSSGTTATLTIRDVRAEDEGDYYCFSGYVDSDSKLYVFGSGTQLTVLGKGELNSKLEGKPIPNPLLGLDSTGSGHHHHHH

SEQ ID NO: 985 - DNA, 1668 bp, Artificial Sequence
  Description of Artificial Sequence: Synthetic polynucleotide
ttaagacccactttcacatttaagttgtttttctaatccgcagatgatcaattcaaggccgaataagaaggctggctctgcaccttggtgatcaaataattcgatagcttgtcgtaataatggcggcatactatcagtagtaggtgtttccctttcttctttagcgacttgatgctcttgatcttccaatacgcaacctaaagtaaaatgccccacagcgctgagtgcatataatgcattctctagtgaaaaaccttgttggcataaaaaggctaattgattttcgagagtttcatactgtttttctgtaggccgtgtacctaaatgtacttttgctccatcgcgatgacttagtaaagcacatctaaaacttttagcgttattacgtaaaaaatcttgccagctttccccttctaaagggcaaaagtgagtatggtgcctatctaacatctcaatggctaaggcgtcgagcaaagcccgcttattttttacatgccaatacaatgtaggctgctctacacctagcttctgggcgagtttacgggttgttaaaccttcgattccgacctcattaagcagctctaatgcgctgttaatcactttacttttatctaatctagacatcattaattcctaatttttgttgacactctatcattgatagagttattttaccactccctatcagtgatagagaaaagtgaaaggaggtaaattatgactagtaaatatcttcttccaacggctgctgctggtttattgcttcttgccgcccagcctgcgatggctgtcgactataaggatgacgacgacaagcaattgggcggtggcatggaagttcgcctgttggagagcggtggaggacttgtgaagcccgagggaagccttaaactttcgtgcgttgctagtgggttcacattttcagactatttcatgtcctgggtccgtcaagccccgggaaaaggacttgaatgggttgcccatatttacaccaagagctataactatgccacatactattctggaagcgttaaaggtcgttttaccatttcgcgtgacgacagccgttctatggtgtatttgcagatgaataaccttcgtacagaagatacggctacttactactgtactcgcgatggatcaggctatcccagtttagatttctggggacagggtactcaggttactgtttcaagcggtggaggcggctctggcggtggtgggagtggaggcggtggcagttacgagctgacgcagccgccctcggcaagtgtaaacgtgggcgaaacggtgaaaattacttgttcgggggatcaactgcccaaatacttcgccgattggtttcatcaacgttccgatcagactattttacaagtgatttatgatgataacaaacgtccgtcaggaatcccagagcgtatcagcggatcgagcagcggaacaacagcaactttgaccatccgcgatgtccgtgccgaagacgagggggactactattgtttctctggatacgtggactcagacagcaagctgtatgtttttggctcaggaacacaactgaccgtactgggcaagggcgagctcaattcgaagcttgaaggtaagcctatccctaaccctctcctcggactcgattctacgggatccggtcatcatcaccatcaccat

SEQ ID NO: 986 - protein, 314 aa, Artificial Sequence
  Description of Artificial Sequence: Synthetic polypeptide
KYLLPTAAAGLLLLAAQPAMAVDYKDDDDKQLGGGMEVRLLESGGGLVKPEGSLKLSCVASGFTFSDYFMSWVRQAPGKGLEWVAHIYTKSYNYATYYSGSVKGRFTISRDDSRSMVYLQMNNLRTEDTATYYCTRDGSGYPSLDFWGQGTQVTVSSGGGGSGGGGSGGGGSYELTQPPSASVNVGETVKITCSGDQLPKYFADWFHQRSDQTILQVIYDDNKRPSGIPERISGSSSGTTATLTIRDVRAEDEGDYYCFSGYVDSDSKLYVFGSGTQLTVLGKGELNSKLEGKPIPNPLLGLDSTGSGHHHHHH

SEQ ID NO: 987 - DNA, 5708 bp, Artificial Sequence
  Description of Artificial Sequence: Synthetic polynucleotide
tagcggagtgtatactggcttactatgttggcactgatgagggtgtcagtgaagtgcttcatgtggcaggagaaaaaaggctgcaccggtgcgtcagcagaatatgtgatacaggatatattccgcttcctcgctcactgactcgctacgctcggtcgttcgactgcggcgagcggaaatggcttacgaacggggcggagatttcctggaagatgccaggaagatacttaacagggaagtgagagggccgcggcaaagccgtttttccataggctccgcccccctgacaagcatcacgaaatctgacgctcaaatcagtggtggcgaaacccgacaggactataaagataccaggcgtttcccctggcggctccctcgtgcgctctcctgttcctgcctttcggtttaccggtgtcattccgctgttatggccgcgtttgtctcattccacgcctgacactcagttccgggtaggcagttcgctccaagctggactgtatgcacgaaccccccgttcagtccgaccgctgcgccttatccggtaactatcgtcttgagtccaacccggaaagacatgcaaaagcaccactggcagcagccactggtaattgatttagaggagttagtcttgaagtcatgcgccggttaaggctaaactgaaaggacaagttttggtgactgcgctcctccaagccagttacctcggttcaaagagttggtagctcagagaaccttcgaaaaaccgccctgcaaggcggttttttcgttttcagagcaagagattacgcgcagaccaaaacgatctcaagaagatcatcttattaaggggtctgacgctcagtggaacggtgcaccctgcagggctagctgataaagcgttcgcgctgcattcggcagtttaagacccactttcacatttaagttgtttttctaatccgcatatgatcaattcaaggccgaataagaaggctggctctgcaccttggtgatcaaataattcgatagcttgtcgtaataatggcggcatactatcagtagtaggtgtttccctttcttctttagcgacttgatgctcttgatcttccaatacgcaacctaaagtaaaatgccccacagcgctgagtgcatataatgcattctctagtgaaaaaccttgttggcataaaaaggctaattgattttcgagagtttcatactgtttttctgtaggccgtgtacctaaatgtacttttgctccatcgcgatgacttagtaaagcacatctaaaacttttagcgttattacgtaaaaaatcttgccagctttccccttctaaagggcaaaagtgagtatggtgcctatctaacatctcaatggctaaggcgtcgagcaaagcccgcttattttttacatgccaatacaatgtaggctgctctacacctagcttctgggcgagtttacgggttgttaaaccttcgattccgacctcattaagcagctctaatgcgctgttaatcactttacttttatctaatctagacatcattaattcctaatttttgttgacactctatcattgatagagttattttaccactccctatcagtgatagagaaaagtgaaaggaggtaaattatgactagtatggttttccaacccatcagcgaatttttgctgattcgtaacgctgggatgtccatgtattttaacaagatcatttcttttaacatcatttcacgtatcgttatttgcatttttcttatctgtggtatgttcatggccggtgcatctgaaaagtatgatgcaaacgcaccccaacaggtgcagccatactcggtttcatcatcagcgttcgagaatctgcaccccaataacgagatggagtcgagtatcaacccttttagtgcttcggacaccgagcgtaatgcagctatcatcgatcgtgctaacaaggaacaagaaacggaagcagtcaacaaaatgatctccactggcgctcgtttagctgccagcggtcgcgcgtccgatgtggcgcacagtatggtaggggatgcggtcaaccaggagattaaacaatggctgaatcgcttcggcactgctcaagtgaatttaaattttgacaagaacttctcgttaaaggagtcttcgcttgactggttggccccatggtacgattcggcgtcattccttttcttttctcagttgggcatccgtaacaaggacagtcgtaatacacttaaccttggtgttggcattcgcacattagaaaatggttggttgtatggcctgaacaccttttacgacaatgacttaacgggacacaatcaccgtatcgggctgggcgccgaggcgtggactgactacttgcagttagccgcgaatgggtacttccgtcttaatggttggcactcttcccgtgacttcagcgactacaaagaacgccctgctaccgggggagatttgcgtgcgaatgcgtacctgcccgctcttccgcaacttggcgggaagttaatgtatgagcagtatactggggaacgcgtggctctgttcggaaaggacaacctgcagcgcaacccatacgctgtcactgcgggtatcaactatacgccagttccgttgctgacggtcggcgtggatcaacgtatggggaagtcgagtaaacatgaaacgcaatggaatttacaaatgaactatcgcttaggggagagtttccaaagtcagcttagcccttcggcggtcgcagggactcgtttgcttgctgagtcccgctacaacctggttgatcgcaataacaatatcgtactggaataccagaaacaacaagtggttaagctgacgttgagccctgcgaccatcagtggattgcccggacaagtttaccaggtaaatgcccaggtccagggggcctctgcggttcgcgaaattgtctggtcagacgcagaattaatcgctgcaggaggcaccttaacgccactttccactacacaattcaatttagtccttcccccatacaaacgtaccgcccaggtatcgcgcgtaactgatgacttaactgctaatttttattcactgtcggcgttagcagttgaccatcaaggcaaccgtagtaattccttcacattatctgtaacggtgcagcagccgcaactgacgcttaccgcagcggtcattggtgatggggccccagctaatgggaaaaccgcaatcactgtcgagttcacagttgcagattttgaaggcaagccgctggcgggtcaggaggttgtgattacgactaataacggtgctcttcctaataagattactgaaaagactgacgctaacggcgttgcccgcattgcccttacgaacacaaccgatggggtcacggtagttaccgcagaggtcgaggggcaacgccaatccgttgacacgcacttcgttaagggtactatcgcggccgataaaagcacgctggccgcggtcgactataaggatgacgacgacaagcaattggaagttcgcctgttggagagcggtggtggacttgtgaaacccgagggaagccttaaactttcgtgcgttgctagtgggttcacattttcagactatttcatgtcctgggtccgtcaagccccgggaaaaggacttgaatgggttgcccatatttacaccaagagctataactatgccacatactattctggaagcgttaaaggtcgttttaccatttcgcgtgacgacagccgttctatggtgtatttgcagatgaataaccttcgtacagaagatacggctacttactactgtactcgcgatggatcaggctatcccagtttagatttctggggacagggtactcaggttactgtttcaagcggtggaggcggctctggcggtggtgggagtggaggcggtggcagttacgagctgacgcagccaccctcggcaagtgtaaacgtgggcgaaacggtgaaaattacttgttcgggggatcaactgcccaaatacttcgccgattggtttcatcaacgttccgatcagactattttacaagtgatttatgatgataacaaacgtccgtcaggaatcccagagcgtatcagcggatcgagcagcggaacaacagcaactttgaccatccgcgatgtccgtgccgaagacgagggggactactattgtttctctggatacgtggactcagacagcaagctgtatgtttttggctcaggaacacaactgaccgtactgggcaagggcgagctcaattcgaagcttgaaggtaagcctatccctaaccctctcctcggcctcgattctacgcgtaccggtcatcatcaccatcaccattgagcatgctaatcagccgtggaattcgcaacgtaaaaaaacccgccccggcgggtttttttataccggtctcaggaggaacgattggtaaacccggtgaacgcatgagaaagcccccggaagatcaccttccgggggcttttttattgcgcggaccaaaacgaaaaaagacgctcgaaagcgtctcttttctggaatttggtaccgaggcgtaatgctctgccagtgttacaaccaattaaccaattctgattagaaaaactcatcgagcatcaaatgaaactgcaatttattcatatcaggattatcaataccatatttttgaaaaagccgtttctgtaatgaaggagaaaactcaccgaggcagttccataggatggcaagatcctggtatcggtctgcgattccgactcgtccaacatcaatacaacctattaatttcccctcgtcaaaaataaggttatcaagtgagaaatcaccatgagtgacgactgaatccggtgagaatggcaaaagcttatgcatttctttccagacttgttcaacaggccagccattacgctcgtcatcaaaatcactcgcatcaaccaaaccgttattcattcgtgattgcgcctgagcgagacgaaatacgcgatcgctgttaaaaggacaattacaaacaggaatcgaatgcaaccggcgcaggaacactgccagcgcatcaacaatattttcacctgaatcaggatattcttctaatacctggaatgctgttttcccggggatcgcagtggtgagtaaccatgcatcatcaggagtacggataaaatgcttgatggtcggaagaggcataaattccgtcagccagtttagtctgaccatctcatctgtaacatcattggcaacgctacctttgccatgtttcagaaacaactctggcgcatcgggcttcccatacaatcgatagattgtcgcacctgattgcccgacattatcgcgagcccatttatacccatataaatcagcatccatgttggaatttaatcgcggcctcgagcaagacgtttcccgttgaatatggctcataacaccccttgtattactgtttatgtaagcagacagttttattgttcatgatgatatatttttatcttgtgcaatgtaacatcagagattttgagacacaacgtggctttgttgaataaatcgaacttttgctgagttgaaggatcagatcacgcatcttcccgacaacgcagaccgttccgtggcaaagcaaaagttcaaaatcaccaactggtccacctacaacaaagctctcatcaaccgtggctccctcactttctggctggatgatggggcgattcaggcctggtatgagtcagcaacaccttcttcacgaggcagacctcagcgc

SEQ ID NO: 988 - DNA, 4282 bp, Artificial Sequence
  Description of Artificial Sequence: Synthetic polynucleotide
tagcggagtgtatactggcttactatgttggcactgatgagggtgtcagtgaagtgcttcatgtggcaggagaaaaaaggctgcaccggtgcgtcagcagaatatgtgatacaggatatattccgcttcctcgctcactgactcgctacgctcggtcgttcgactgcggcgagcggaaatggcttacgaacggggcggagatttcctggaagatgccaggaagatacttaacagggaagtgagagggccgcggcaaagccgtttttccataggctccgcccccctgacaagcatcacgaaatctgacgctcaaatcagtggtggcgaaacccgacaggactataaagataccaggcgtttcccctggcggctccctcgtgcgctctcctgttcctgcctttcggtttaccggtgtcattccgctgttatggccgcgtttgtctcattccacgcctgacactcagttccgggtaggcagttcgctccaagctggactgtatgcacgaaccccccgttcagtccgaccgctgcgccttatccggtaactatcgtcttgagtccaacccggaaagacatgcaaaagcaccactggcagcagccactggtaattgatttagaggagttagtcttgaagtcatgcgccggttaaggctaaactgaaaggacaagttttggtgactgcgctcctccaagccagttacctcggttcaaagagttggtagctcagagaaccttcgaaaaaccgccctgcaaggcggttttttcgttttcagagcaagagattacgcgcagaccaaaacgatctcaagaagatcatcttattaaggggtctgacgctcagtggaacggtgcaccctgcagggctagctgataaagcgttcgcgctgcattcggcagtttaagacccactttcacatttaagttgtttttctaatccgcatatgatcaattcaaggccgaataagaaggctggctctgcaccttggtgatcaaataattcgatagcttgtcgtaataatggcggcatactatcagtagtaggtgtttccctttcttctttagcgacttgatgctcttgatcttccaatacgcaacctaaagtaaaatgccccacagcgctgagtgcatataatgcattctctagtgaaaaaccttgttggcataaaaaggctaattgattttcgagagtttcatactgtttttctgtaggccgtgtacctaaatgtacttttgctccatcgcgatgacttagtaaagcacatctaaaacttttagcgttattacgtaaaaaatcttgccagctttccccttctaaagggcaaaagtgagtatggtgcctatctaacatctcaatggctaaggcgtcgagcaaagcccgcttattttttacatgccaatacaatgtaggctgctctacacctagcttctgggcgagtttacgggttgttaaaccttcgattccgacctcattaagcagctctaatgcgctgttaatcactttacttttatctaatctagacatcattaattcctaatttttgttgacactctatcattgatagagttattttaccactccctatcagtgatagagaaaagtgaaaggaggtaaattatgactagtaaagcaacaaaacttgtgttaggcgcggttatacttggctccaccctgcttgcaggttgctcgtctaacgcgaagatcgaccagggtatcaatccttacgtcgggtttgaaatgggatacgattggttgggacgtatgccttataagggaagtgttgaaaacggcgcttataaggcgcagggagtacagttaacggccaagcttgggtaccccataacagacgatttagatatttatacccgtttaggaggaatggtttggagagccgacacgaagtctaatgtatatggtaagaaccacgacacgggagtatcccccgtctttgcagggggagtggaatatgctatcacaccagagatcgctacccgtttggaatatcaatggacgaataatataggcgacgcccatacgataggaacgcggcccgacaacggcatccctggggtcgactataaggatgacgacgacaagcaattggaagttcgcctgttggagagcggtggtggacttgtgaaacccgagggaagccttaaactttcgtgcgttgctagtgggttcacattttcagactatttcatgtcctgggtccgtcaagccccgggaaaaggacttgaatgggttgcccatatttacaccaagagctataactatgccacatactattctggaagcgttaaaggtcgttttaccatttcgcgtgacgacagccgttctatggtgtatttgcagatgaataaccttcgtacagaagatacggctacttactactgtactcgcgatggatcaggctatcccagtttagatttctggggacagggtactcaggttactgtttcaagcggtggaggcggctctggcggtggtgggagtggaggcggtggcagttacgagctgacgcagccaccctcggcaagtgtaaacgtgggcgaaacggtgaaaattacttgttcgggggatcaactgcccaaatacttcgccgattggtttcatcaacgttccgatcagactattttacaagtgatttatgatgataacaaacgtccgtcaggaatcccagagcgtatcagcggatcgagcagcggaacaacagcaactttgaccatccgcgatgtccgtgccgaagacgagggggactactattgtttctctggatacgtggactcagacagcaagctgtatgtttttggctcaggaacacaactgaccgtactgggcaagggcgagctcaattcgaagcttgaaggtaagcctatccctaaccctctcctcggcctcgattctacgcgtaccggtcatcatcaccatcaccattgagcatgcgaattcggtctcaggaggaacgattggtaaacccggtgaacgcatgagaaagcccccggaagatcaccttccgggggcttttttattgcgcggaccaaaacgaaaaaagacgctcgaaagcgtctcttttctggaatttggtaccgaggcgtaatgctctgccagtgttacaaccaattaaccaattctgattagaaaaactcatcgagcatcaaatgaaactgcaatttattcatatcaggattatcaataccatatttttgaaaaagccgtttctgtaatgaaggagaaaactcaccgaggcagttccataggatggcaagatcctggtatcggtctgcgattccgactcgtccaacatcaatacaacctattaatttcccctcgtcaaaaataaggttatcaagtgagaaatcaccatgagtgacgactgaatccggtgagaatggcaaaagcttatgcatttctttccagacttgttcaacaggccagccattacgctcgtcatcaaaatcactcgcatcaaccaaaccgttattcattcgtgattgcgcctgagcgagacgaaatacgcgatcgctgttaaaaggacaattacaaacaggaatcgaatgcaaccggcgcaggaacactgccagcgcatcaacaatattttcacctgaatcaggatattcttctaatacctggaatgctgttttcccggggatcgcagtggtgagtaaccatgcatcatcaggagtacggataaaatgcttgatggtcggaagaggcataaattccgtcagccagtttagtctgaccatctcatctgtaacatcattggcaacgctacctttgccatgtttcagaaacaactctggcgcatcgggcttcccatacaatcgatagattgtcgcacctgattgcccgacattatcgcgagcccatttatacccatataaatcagcatccatgttggaatttaatcgcggcctcgagcaagacgtttcccgttgaatatggctcataacaccccttgtattactgtttatgtaagcagacagttttattgttcatgatgatatatttttatcttgtgcaatgtaacatcagagattttgagacacaacgtggctttgttgaataaatcgaacttttgctgagttgaaggatcagatcacgcatcttcccgacaacgcagaccgttccgtggcaaagcaaaagttcaaaatcaccaactggtccacctacaacaaagctctcatcaaccgtggctccctcactttctggctggatgatggggcgattcaggcctggtatgagtcagcaacaccttcttcacgaggcagacctcagcgc

SEQ ID NO: 989 - DNA, 5864 bp, Artificial Sequence
  Description of Artificial Sequence: Synthetic polynucleotide
tagcggagtgtatactggcttactatgttggcactgatgagggtgtcagtgaagtgcttcatgtggcaggagaaaaaaggctgcaccggtgcgtcagcagaatatgtgatacaggatatattccgcttcctcgctcactgactcgctacgctcggtcgttcgactgcggcgagcggaaatggcttacgaacggggcggagatttcctggaagatgccaggaagatacttaacagggaagtgagagggccgcggcaaagccgtttttccataggctccgcccccctgacaagcatcacgaaatctgacgctcaaatcagtggtggcgaaacccgacaggactataaagataccaggcgtttcccctggcggctccctcgtgcgctctcctgttcctgcctttcggtttaccggtgtcattccgctgttatggccgcgtttgtctcattccacgcctgacactcagttccgggtaggcagttcgctccaagctggactgtatgcacgaaccccccgttcagtccgaccgctgcgccttatccggtaactatcgtcttgagtccaacccggaaagacatgcaaaagcaccactggcagcagccactggtaattgatttagaggagttagtcttgaagtcatgcgccggttaaggctaaactgaaaggacaagttttggtgactgcgctcctccaagccagttacctcggttcaaagagttggtagctcagagaaccttcgaaaaaccgccctgcaaggcggttttttcgttttcagagcaagagattacgcgcagaccaaaacgatctcaagaagatcatcttattaaggggtctgacgctcagtggaacggtgcaccctgcagggctagctgataaagcgttcgcgctgcattcggcagtttaagacccactttcacatttaagttgtttttctaatccgcatatgatcaattcaaggccgaataagaaggctggctctgcaccttggtgatcaaataattcgatagcttgtcgtaataatggcggcatactatcagtagtaggtgtttccctttcttctttagcgacttgatgctcttgatcttccaatacgcaacctaaagtaaaatgccccacagcgctgagtgcatataatgcattctctagtgaaaaaccttgttggcataaaaaggctaattgattttcgagagtttcatactgtttttctgtaggccgtgtacctaaatgtacttttgctccatcgcgatgacttagtaaagcacatctaaaacttttagcgttattacgtaaaaaatcttgccagctttccccttctaaagggcaaaagtgagtatggtgcctatctaacatctcaatggctaaggcgtcgagcaaagcccgcttattttttacatgccaatacaatgtaggctgctctacacctagcttctgggcgagtttacgggttgttaaaccttcgattccgacctcattaagcagctctaatgcgctgttaatcactttacttttatctaatctagacatcattaattcctaatttttgttgacactctatcattgatagagttattttaccactccctatcagtgatagagaaaagtgaaaggaggtaaattatgactagtattacgcatggctgttatacccgtacgcgtcataaacacaagttgaagaaaactctgatcatgttatccgctggacttggactttttttttacgtgaatcagaactctttcgctaatggggaaaattattttaaactgggatcagacagcaaattacttacgcatgactcataccagaatcgtctgttttatacgctgaaaactggtgaaaccgttgcagatttaagtaaaagtcaggacattaacctgtcaactatttggtcacttaataaacacttatattcgagcgaatcggaaatgatgaaagctgcaccggggcaacaaatcatcttgcccctgaagaaattgccctttgaatactccgctttgcccttgctgggctcggctcctctggtagccgccggaggcgttgccggtcacactaataagctgacaaaaatgtcacccgacgtgacgaagagcaacatgacggatgataaggctttaaattacgcagctcagcaagcggcctcgttgggaagtcagttacagagtcgttcgttaaatggtgattatgctaaggataccgcattgggtattgccggcaaccaagcgtcgagccaacttcaggcatggttgcaacattacggcactgctgaagtaaatctgcaatcaggtaataattttgacggtagttccctggatttccttttacctttttacgattcagaaaagatgttggctttcggacaggtgggggcgcgttacatcgattcacgttttaccgctaacttgggggccggtcaacgcttcttcttacctgccaatatgttgggctataatgtatttatcgaccaggacttcagtggtgacaatacacgtctgggaattggtggagagtattggcgcgattactttaagtcatctgtaaatggctattttcgcatgagcggttggcatgaaagttacaacaagaaagactacgatgagcgccccgcgaacgggtttgacatccgttttaatggttatttgccatcttatcccgccttgggagctaaattaatctacgagcaatactatggagataacgtagctttgtttaatagcgacaagttacagtctaatccaggagcggctacagtgggagttaattataccccaatcccactggtcacaatgggaatcgattatcgccacgggactggtaatgaaaacgatttattatactccatgcagtttcgttatcagttcgataagagttggtcgcagcagattgagcctcaatatgttaacgaattacgtaccttgtccggcagtcgctacgatctggtacaacgcaataacaatatcatccttgagtataagaaacaggacattctgtctttgaacattccacatgatattaatggtaccgagcactcaacacaaaaaattcagctgattgtgaaatcaaagtatggactggaccgtatcgtgtgggatgatagcgctctgcgcagtcagggtggacagatccagcactcgggtagccagtctgcccaagactaccaggctatcctgccagcgtatgtccaagggggaagtaacatctacaaagttacagctcgcgcctattaccgcaacggtaattctagtaataatgtgcagttgacaattacggtgctgtccaatgggcaggtcgtcgatcaggtaggtgtgacggattttacagccgataaaacctctgcgaaggcagataacgcggataccatcacatacactgccactgtaaaaaaaaacggtgtcgcgcaggcaaacgttcctgttagcttcaacatcgtgtcgggtacagccacccttggggccaactcggcaaagactgacgcgaatggcaaggctacagtcacgttgaaatcctcgacaccaggacaggtcgttgtgtctgccaagacagcagagatgacctccgcccttaatgcatctgctgttatcttcttcgatcaaacgaaggcatctgtcgactataaggatgacgacgacaagcaattggaagttcgcctgttggagagcggtggtggacttgtgaaacccgagggaagccttaaactttcgtgcgttgctagtgggttcacattttcagactatttcatgtcctgggtccgtcaagccccgggaaaaggacttgaatgggttgcccatatttacaccaagagctataactatgccacatactattctggaagcgttaaaggtcgttttaccatttcgcgtgacgacagccgttctatggtgtatttgcagatgaataaccttcgtacagaagatacggctacttactactgtactcgcgatggatcaggctatcccagtttagatttctggggacagggtactcaggttactgtttcaagcggtggaggcggctctggcggtggtgggagtggaggcggtggcagttacgagctgacgcagccaccctcggcaagtgtaaacgtgggcgaaacggtgaaaattacttgttcgggggatcaactgcccaaatacttcgccgattggtttcatcaacgttccgatcagactattttacaagtgatttatgatgataacaaacgtccgtcaggaatcccagagcgtatcagcggatcgagcagcggaacaacagcaactttgaccatccgcgatgtccgtgccgaagacgagggggactactattgtttctctggatacgtggactcagacagcaagctgtatgtttttggctcaggaacacaactgaccgtactgggcaagggcgagctcaattcgaagcttgaaggtaagcctatccctaaccctctcctcggcctcgattctacgcgtaccggtcatcatcaccatcaccattgagcatgctaatcagccgtggaattcgcaacgtaaaaaaacccgccccggcgggtttttttataccggtctcaggaggaacgattggtaaacccggtgaacgcatgagaaagcccccggaagatcaccttccgggggcttttttattgcgcggaccaaaacgaaaaaagacgctcgaaagcgtctcttttctggaatttggtaccgaggcgtaatgctctgccagtgttacaaccaattaaccaattctgattagaaaaactcatcgagcatcaaatgaaactgcaatttattcatatcaggattatcaataccatatttttgaaaaagccgtttctgtaatgaaggagaaaactcaccgaggcagttccataggatggcaagatcctggtatcggtctgcgattccgactcgtccaacatcaatacaacctattaatttcccctcgtcaaaaataaggttatcaagtgagaaatcaccatgagtgacgactgaatccggtgagaatggcaaaagcttatgcatttctttccagacttgttcaacaggccagccattacgctcgtcatcaaaatcactcgcatcaaccaaaccgttattcattcgtgattgcgcctgagcgagacgaaatacgcgatcgctgttaaaaggacaattacaaacaggaatcgaatgcaaccggcgcaggaacactgccagcgcatcaacaatattttcacctgaatcaggatattcttctaatacctggaatgctgttttcccggggatcgcagtggtgagtaaccatgcatcatcaggagtacggataaaatgcttgatggtcggaagaggcataaattccgtcagccagtttagtctgaccatctcatctgtaacatcattggcaacgctacctttgccatgtttcagaaacaactctggcgcatcgggcttcccatacaatcgatagattgtcgcacctgattgcccgacattatcgcgagcccatttatacccatataaatcagcatccatgttggaatttaatcgcggcctcgagcaagacgtttcccgttgaatatggctcataacaccccttgtattactgtttatgtaagcagacagttttattgttcatgatgatatatttttatcttgtgcaatgtaacatcagagattttgagacacaacgtggctttgttgaataaatcgaacttttgctgagttgaaggatcagatcacgcatcttcccgacaacgcagaccgttccgtggcaaagcaaaagttcaaaatcaccaactggtccacctacaacaaagctctcatcaaccgtggctccctcactttctggctggatgatggggcgattcaggcctggtatgagtcagcaacaccttcttcacgaggcagacctcagcgc

SEQ ID NO: 990 - protein, 607 aa, Artificial Sequence
  Description of Artificial Sequence: Synthetic polypeptide
MVFQPISEFLLIRNAGMSMYFNKIISFNIISRIVICIFLICGMFMAGASEKYDANAPQQVQPYSVSSSAFENLHPNNEMESSINPFSASDTERNAAIIDRANKEQETEAVNKMISTGARLAASGRASDVAHSMVGDAVNQEIKQWLNRFGTAQVNLNFDKNFSLKESSLDWLAPWYDSASFLFFSQLGIRNKDSRNTLNLGVGIRTLENGWLYGLNTFYDNDLTGHNHRIGLGAEAWTDYLQLAANGYFRLNGWHSSRDFSDYKERPATGGDLRANAYLPALPQLGGKLMYEQYTGERVALFGKDNLQRNPYAVTAGINYTPVPLLTVGVDQRMGKSSKHETQWNLQMNYRLGESFQSQLSPSAVAGTRLLAESRYNLVDRNNNIVLEYQKQQVVKLTLSPATISGLPGQVYQVNAQVQGASAVREIVWSDAELIAAGGTLTPLSTTQFNLVLPPYKRTAQVSRVTDDLTANFYSLSALAVDHQGNRSNSFTLSVTVQQPQLTLTAAVIGDGAPANGKTAITVEFTVADFEGKPLAGQEVVITTNNGALPNKITEKTDANGVARIALTNTTDGVTVVTAEVEGQRQSVDTHFVKGTIAADKSTLAAV

SEQ ID NO: 991 - protein, 148 aa, Artificial Sequence
  Description of Artificial Sequence: Synthetic polypeptide
KATKLVLGAVILGSTLLAGCSSNAKIDQGINPYVGFEMGYDWLGRMPYKGSVENGAYKAQGVQLTAKLGYPITDDLDIYTRLGGMVWRADTKSNVYGKNHDTGVSPVFAGGVEYAITPEIATRLEYQWTNNIGDAHTIGTRPDNGIPG

SEQ ID NO: 992 - protein, 658 aa, Artificial Sequence
  Description of Artificial Sequence: Synthetic polypeptide
ITHGCYTRTRHKHKLKKTLIMLSAGLGLFFYVNQNSFANGENYFKLGSDSKLLTHDSYQNRLFYTLKTGETVADLSKSQDINLSTIWSLNKHLYSSESEMMKAAPGQQIILPLKKLPFEYSALPLLGSAPLVAAGGVAGHTNKLTKMSPDVTKSNMTDDKALNYAAQQAASLGSQLQSRSLNGDYAKDTALGIAGNQASSQLQAWLQHYGTAEVNLQSGNNFDGSSLDFLLPFYDSEKMLAFGQVGARYIDSRFTANLGAGQRFFLPANMLGYNVFIDQDFSGDNTRLGIGGEYWRDYFKSSVNGYFRMSGWHESYNKKDYDERPANGFDIRFNGYLPSYPALGAKLIYEQYYGDNVALFNSDKLQSNPGAATVGVNYTPIPLVTMGIDYRHGTGNENDLLYSMQFRYQFDKSWSQQIEPQYVNELRTLSGSRYDLVQRNNNIILEYKKQDILSLNIPHDINGTEHSTQKIQLIVKSKYGLDRIVWDDSALRSQGGQIQHSGSQSAQDYQAILPAYVQGGSNIYKVTARAYYRNGNSSNNVQLTITVLSNGQVVDQVGVTDFTADKTSAKADNADTITYTATVKKNGVAQANVPVSFNIVSGTATLGANSAKTDANGKATVTLKSSTPGQVVVSAKTAEMTSALNASAVIFFDQTKAS

SEQ ID NO: 993 - DNA, 5121 bp, Artificial Sequence
  Description of Artificial Sequence: Synthetic polynucleotide
agcgcccaatacgcaaaccgcctctccccgcgcgttggccgattcattaatgcagctggcacgacaggtttcccgactggaaagcgggcagtgagcgcaacgcaattaatgtgagttagctcactcattaggcaccccaggctttacactttatgcttccggctcgtatgttgtgtggaattgtgagcggataacaatttcacacaggaaacagctatgaccatgattacgccaagctatttaggtgacactatagaatactcaagctatgcatcaagcttggtaccgagctcggatccactagtaacggccgccagtgtgctggaattcgcccttttaagacccactttcacatttaagttgtttttctaatccgcagatgatcaattcaaggccgaataagaaggctggctctgcaccttggtgatcaaataattcgatagcttgtcgtaataatggcggcatactatcagtagtaggtgtttccctttcttctttagcgacttgatgctcttgatcttccaatacgcaacctaaagtaaaatgccccacagcgctgagtgcatataatgcattctctagtgaaaaaccttgttggcataaaaaggctaattgattttcgagagtttcatactgtttttctgtaggccgtgtacctaaatgtacttttgctccatcgcgatgacttagtaaagcacatctaaaacttttagcgttattacgtaaaaaatcttgccagctttccccttctaaagggcaaaagtgagtatggtgcctatctaacatctcaatggctaaggcgtcgagcaaagcccgcttattttttacatgccaatacaatgtaggctgctctacacctagcttctgggcgagtttacgggttgttaaaccttcgattccgacctcattaagcagctctaatgcgctgttaatcactttacttttatctaatctagacatcattaattcctaatttttgttgacactctatcattgatagagttattttaccactccctatcagtgatagagaaaagtgaaaggaggtaaattcatatgactagtcaattgggtggtagcgaggtccagctggtggaatctggcggagacttagtaaagccgggaggttcgttgaagttgagttgcgctgctagtgggtttacgtttagcggctatggtatgtcatgggtccgccaaacacccgataaacgtttagagtgggtcgccacgattacgagtggaggcacctacacctattatccggattctgtcaaaggccgctttactatttctcgtgataatgcaaagaacaccttatatttacagatcgactccttgaagtctgaggataccgcaatttatttctgtgcccgttcgttagccggtaatgctatggattattgggggcaaggcacatctgtcacagtctcatccggaggaggcggatcaggtggtggcggttctggcggcggcggatctgacattgtgatgacacaatcacctgcgacactttcggttactccaggagaccgcgttagcttgtcgtgtcgcgcctctcaaaccatcagtgactacttacattggtaccaacagaaatcccatgaatcgccacgcttacttattaagtttgcgtcccaatcaattagtggtattccgtcgcgctttagtggtagcggttctggttctgatttcacattgtcaatcaacagcgtggagccggaggatgttggtgtttactactgccaaaacggtcacggctttccacgtacattcggagggggaacgaagttggaaattaaaggcagcggcgagctcggtggcagtggtaagcctatccctaaccctctcctcggcctcgattctacgggatccggtcatcatcaccatcaccattgagcatgctaatcagccgtggaattcgaattcggtctcaggaggaagggcgaattctgcagatatccatcacactggcggccgctcgagcatgcatctagagggcccaattcgccctatagtgagtcgtattacaattcactggccgtcgttttacaacgtcgtgactgggaaaaccctggcgttacccaacttaatcgccttgcagcacatccccctttcgccagctggcgtaatagcgaagaggcccgcaccgatcgcccttcccaacagttgcgcagcctatacgtacggcagtttaaggtttacacctataaaagagagagccgttatcgtctgtttgtggatgtacagagtgatattattgacacgccggggcgacggatggtgatccccctggccagtgcacgtctgctgtcagataaagtctcccgtgaactttacccggtggtgcatatcggggatgaaagctggcgcatgatgaccaccgatatggccagtgtgccggtctccgttatcggggaagaagtggctgatctcagccaccgcgaaaatgacatcaaaaacgccattaacctgatgttctggggaatataaatgtcaggcatgagattatcaaaaaggatcttcacctagatccttttcacgtagaaagccagtccgcagaaacggtgctgaccccggatgaatgtcagctactgggctatctggacaagggaaaacgcaagcgcaaagagaaagcaggtagcttgcagtgggcttacatggcgatagctagactgggcggttttatggacagcaagcgaaccggaattgccagctggggcgccctctggtaaggttgggaagccctgcaaagtaaactggatggctttctcgccgccaaggatctgatggcgcaggggatcaagctctgatcaagagacaggatgaggatcgtttcgcatgattgaacaagatggattgcacgcaggttctccggccgcttgggtggagaggctattcggctatgactgggcacaacagacaatcggctgctctgatgccgccgtgttccggctgtcagcgcaggggcgcccggttctttttgtcaagaccgacctgtccggtgccctgaatgaactgcaagacgaggcagcgcggctatcgtggctggccacgacgggcgttccttgcgcagctgtgctcgacgttgtcactgaagcgggaagggactggctgctattgggcgaagtgccggggcaggatctcctgtcatctcaccttgctcctgccgagaaagtatccatcatggctgatgcaatgcggcggctgcatacgcttgatccggctacctgcccattcgaccaccaagcgaaacatcgcatcgagcgagcacgtactcggatggaagccggtcttgtcgatcaggatgatctggacgaagagcatcaggggctcgcgccagccgaactgttcgccaggctcaaggcgagcatgcccgacggcgaggatctcgtcgtgacccatggcgatgcctgcttgccgaatatcatggtggaaaatggccgcttttctggattcatcgactgtggccggctgggtgtggcggaccgctatcaggacatagcgttggctacccgtgatattgctgaagagcttggcggcgaatgggctgaccgcttcctcgtgctttacggtatcgccgctcccgattcgcagcgcatcgccttctatcgccttcttgacgagttcttctgaattattaacgcttacaatttcctgatgcggtattttctccttacgcatctgtgcggtatttcacaccgcatacaggtggcacttttcggggaaatgtgcgcggaacccctatttgtttatttttctaaatacattcaaatatgtatccgctcatgagacaataaccctgataaatgcttcaataatagcacgtgaggagggccaccatggccaagttgaccagtgccgttccggtgctcaccgcgcgcgacgtcgccggagcggtcgagttctggaccgaccggctcgggttctcccgggacttcgtggaggacgacttcgccggtgtggtccgggacgacgtgaccctgttcatcagcgcggtccaggaccaggtggtgccggacaacaccctggcctgggtgtgggtgcgcggcctggacgagctgtacgccgagtggtcggaggtcgtgtccacgaacttccgggacgcctccgggccggccatgaccgagatcggcgagcagccgtgggggcgggagttcgccctgcgcgacccggccggcaactgcgtgcacttcgtggccgaggagcaggactgacacgtgctaaaacttcatttttaatttaaaaggatctaggtgaagatcctttttgataatctcatgaccaaaatcccttaacgtgagttttcgttccactgagcgtcagaccccgtagaaaagatcaaaggatcttcttgagatcctttttttctgcgcgtaatctgctgcttgcaaacaaaaaaaccaccgctaccagcggtggtttgtttgccggatcaagagctaccaactctttttccgaaggtaactggcttcagcagagcgcagataccaaatactgtccttctagtgtagccgtagttaggccaccacttcaagaactctgtagcaccgcctacatacctcgctctgctaatcctgttaccagtggctgctgccagtggcgataagtcgtgtcttaccgggttggactcaagacgatagttaccggataaggcgcagcggtcgggctgaacggggggttcgtgcacacagcccagcttggagcgaacgacctacaccgaactgagatacctacagcgtgagctatgagaaagcgccacgcttcccgaagggagaaaggcggacaggtatccggtaagcggcagggtcggaacaggagagcgcacgagggagcttccagggggaaacgcctggtatctttatagtcctgtcgggtttcgccacctctgacttgagcgtcgatttttgtgatgctcgtcaggggggcggagcctatggaaaaacgccagcaacgcggcctttttacggttcctgggcttttgctggccttttgctcacatgttctttcctgcgttatcccctgattctgtggataaccgtattaccgcctttgagtgagctgataccgctcgccgcagccgaacgaccgagcgcagcgagtcagtgagcgaggaagcggaag

SEQ ID NO: 994 - protein, 240 aa, Artificial Sequence
  Description of Artificial Sequence: Synthetic polypeptide
EVQLVESGGDLVKPGGSLKLSCAASGFTFSGYGMSWVRQTPDKRLEWVATITSGGTYTYYPDSVKGRFTISRDNAKNTLYLQIDSLKSEDTAIYFCARSLAGNAMDYWGQGTSVTVSSGGGGSGGGGSGGGGSDIVMTQSPATLSVTPGDRVSLSCRASQTISDYLHWYQQKSHESPRLLIKFASQSISGIPSRFSGSGSGSDFTLSINSVEPEDVGVYYCQNGHGFPRTFGGGTKLEIK

SEQ ID NO: 995 - DNA, 5133 bp, Artificial Sequence
  Description of Artificial Sequence: Synthetic polynucleotide
agcgcccaatacgcaaaccgcctctccccgcgcgttggccgattcattaatgcagctggcacgacaggtttcccgactggaaagcgggcagtgagcgcaacgcaattaatgtgagttagctcactcattaggcaccccaggctttacactttatgcttccggctcgtatgttgtgtggaattgtgagcggataacaatttcacacaggaaacagctatgaccatgattacgccaagctatttaggtgacactatagaatactcaagctatgcatcaagcttggtaccgagctcggatccactagtaacggccgccagtgtgctggaattcgcccttttaagacccactttcacatttaagttgtttttctaatccgcagatgatcaattcaaggccgaataagaaggctggctctgcaccttggtgatcaaataattcgatagcttgtcgtaataatggcggcatactatcagtagtaggtgtttccctttcttctttagcgacttgatgctcttgatcttccaatacgcaacctaaagtaaaatgccccacagcgctgagtgcatataatgcattctctagtgaaaaaccttgttggcataaaaaggctaattgattttcgagagtttcatactgtttttctgtaggccgtgtacctaaatgtacttttgctccatcgcgatgacttagtaaagcacatctaaaacttttagcgttattacgtaaaaaatcttgccagctttccccttctaaagggcaaaagtgagtatggtgcctatctaacatctcaatggctaaggcgtcgagcaaagcccgcttattttttacatgccaatacaatgtaggctgctctacacctagcttctgggcgagtttacgggttgttaaaccttcgattccgacctcattaagcagctctaatgcgctgttaatcactttacttttatctaatctagacatcattaattcctaatttttgttgacactctatcattgatagagttattttaccactccctatcagtgatagagaaaagtgaaaggaggtaaattcatatgactagtcaattgggtggtagccaggtgcagcttgtgcagagtggcgctgaagtgaagaaaccgggcgcatcagtgaaagtgagctgcaaagcaagcggttataccttcacgaactataacatgcactgggtacgtcaagcacccggccagcgtcttgagtggatgggcaccatttatcctggaaacgacgacacatcctacaaccaaaagtttaaggaccgcgtaactatcactgctgacacttcagcttccacagcatatatggagcttagtagcctgcgtagtgaagacacagcggtctactactgcgcacgtggagggtatcgtgcgatggactactgggggcagggcacacttgtgactgtttcatctggcggtggaggctctggaggggggggtagcggggggggcggtagcgatatcgtaatgactcagtccccactttccttacccgtcacaccgggcgaacctgcatctattagctgtcgttcgtcgcaaagcattgtttactcgaatgggaatacgtacttggggtggtatcttcaaaaaccagggcagtcccctcagttgttgatctacaaggtgtccaaccgctttagtggggtgcctgatcgtttctctggcagtggtagtggtaccgacttcacgcttaaaatttcccgtgtcgaagcagaagacgttggcgtatattactgcttccaaggcagtcatgtgccatacacgttcgggcaaggcaccaaacttgagatcaaaggcagcggcgagctcggtggcagtggtaagcctatccctaaccctctcctcggcctcgattctacgggatccggtcatcatcaccatcaccattgagcatgctaatcagccgtggaattcgaattcggtctcaggaggaagggcgaattctgcagatatccatcacactggcggccgctcgagcatgcatctagagggcccaattcgccctatagtgagtcgtattacaattcactggccgtcgttttacaacgtcgtgactgggaaaaccctggcgttacccaacttaatcgccttgcagcacatccccctttcgccagctggcgtaatagcgaagaggcccgcaccgatcgcccttcccaacagttgcgcagcctatacgtacggcagtttaaggtttacacctataaaagagagagccgttatcgtctgtttgtggatgtacagagtgatattattgacacgccggggcgacggatggtgatccccctggccagtgcacgtctgctgtcagataaagtctcccgtgaactttacccggtggtgcatatcggggatgaaagctggcgcatgatgaccaccgatatggccagtgtgccggtctccgttatcggggaagaagtggctgatctcagccaccgcgaaaatgacatcaaaaacgccattaacctgatgttctggggaatataaatgtcaggcatgagattatcaaaaaggatcttcacctagatccttttcacgtagaaagccagtccgcagaaacggtgctgaccccggatgaatgtcagctactgggctatctggacaagggaaaacgcaagcgcaaagagaaagcaggtagcttgcagtgggcttacatggcgatagctagactgggcggttttatggacagcaagcgaaccggaattgccagctggggcgccctctggtaaggttgggaagccctgcaaagtaaactggatggctttctcgccgccaaggatctgatggcgcaggggatcaagctctgatcaagagacaggatgaggatcgtttcgcatgattgaacaagatggattgcacgcaggttctccggccgcttgggtggagaggctattcggctatgactgggcacaacagacaatcggctgctctgatgccgccgtgttccggctgtcagcgcaggggcgcccggttctttttgtcaagaccgacctgtccggtgccctgaatgaactgcaagacgaggcagcgcggctatcgtggctggccacgacgggcgttccttgcgcagctgtgctcgacgttgtcactgaagcgggaagggactggctgctattgggcgaagtgccggggcaggatctcctgtcatctcaccttgctcctgccgagaaagtatccatcatggctgatgcaatgcggcggctgcatacgcttgatccggctacctgcccattcgaccaccaagcgaaacatcgcatcgagcgagcacgtactcggatggaagccggtcttgtcgatcaggatgatctggacgaagagcatcaggggctcgcgccagccgaactgttcgccaggctcaaggcgagcatgcccgacggcgaggatctcgtcgtgacccatggcgatgcctgcttgccgaatatcatggtggaaaatggccgcttttctggattcatcgactgtggccggctgggtgtggcggaccgctatcaggacatagcgttggctacccgtgatattgctgaagagcttggcggcgaatgggctgaccgcttcctcgtgctttacggtatcgccgctcccgattcgcagcgcatcgccttctatcgccttcttgacgagttcttctgaattattaacgcttacaatttcctgatgcggtattttctccttacgcatctgtgcggtatttcacaccgcatacaggtggcacttttcggggaaatgtgcgcggaacccctatttgtttatttttctaaatacattcaaatatgtatccgctcatgagacaataaccctgataaatgcttcaataatagcacgtgaggagggccaccatggccaagttgaccagtgccgttccggtgctcaccgcgcgcgacgtcgccggagcggtcgagttctggaccgaccggctcgggttctcccgggacttcgtggaggacgacttcgccggtgtggtccgggacgacgtgaccctgttcatcagcgcggtccaggaccaggtggtgccggacaacaccctggcctgggtgtgggtgcgcggcctggacgagctgtacgccgagtggtcggaggtcgtgtccacgaacttccgggacgcctccgggccggccatgaccgagatcggcgagcagccgtgggggcgggagttcgccctgcgcgacccggccggcaactgcgtgcacttcgtggccgaggagcaggactgacacgtgctaaaacttcatttttaatttaaaaggatctaggtgaagatcctttttgataatctcatgaccaaaatcccttaacgtgagttttcgttccactgagcgtcagaccccgtagaaaagatcaaaggatcttcttgagatcctttttttctgcgcgtaatctgctgcttgcaaacaaaaaaaccaccgctaccagcggtggtttgtttgccggatcaagagctaccaactctttttccgaaggtaactggcttcagcagagcgcagataccaaatactgtccttctagtgtagccgtagttaggccaccacttcaagaactctgtagcaccgcctacatacctcgctctgctaatcctgttaccagtggctgctgccagtggcgataagtcgtgtcttaccgggttggactcaagacgatagttaccggataaggcgcagcggtcgggctgaacggggggttcgtgcacacagcccagcttggagcgaacgacctacaccgaactgagatacctacagcgtgagctatgagaaagcgccacgcttcccgaagggagaaaggcggacaggtatccggtaagcggcagggtcggaacaggagagcgcacgagggagcttccagggggaaacgcctggtatctttatagtcctgtcgggtttcgccacctctgacttgagcgtcgatttttgtgatgctcgtcaggggggcggagcctatggaaaaacgccagcaacgcggcctttttacggttcctgggcttttgctggccttttgctcacatgttctttcctgcgttatcccctgattctgtggataaccgtattaccgcctttgagtgagctgataccgctcgccgcagccgaacgaccgagcgcagcgagtcagtgagcgaggaagcggaag

SEQ ID NO: 996 - protein, 244 aa, Artificial Sequence
  Description of Artificial Sequence: Synthetic polypeptide
QVQLVQSGAEVKKPGASVKVSCKASGYTFTNYNMHWVRQAPGQRLEWMGTIYPGNDDTSYNQKFKDRVTITADTSASTAYMELSSLRSEDTAVYYCARGGYRAMDYWGQGTLVTVSSGGGGSGGGGSGGGGSDIVMTQSPLSLPVTPGEPASISCRSSQSIVYSNGNTYLGWYLQKPGQSPQLLIYKVSNRFSGVPDRFSGSGSGTDFTLKISRVEAEDVGVYYCFQGSHVPYTFGQGTKLEIK

SEQ ID NO: 997-1050 - skipped (54 entries)

SEQ ID NO: 1051 - protein, 26 aa, Artificial Sequence
  Description of Artificial Sequence: Synthetic peptide
SSADDAKKDAAKKDDAKKDDAKKDAS

SEQ ID NO: 1052 - protein, 15 aa, Artificial Sequence
  Description of Artificial Sequence: Synthetic peptide
GGGGSGGGGSGGGGS

SEQ ID NO: 1053 - protein, 30 aa, Artificial Sequence
  Description of Artificial Sequence: Synthetic polypeptide
  MISC_FEATURE (1)..(30): This sequence may encompass 1-6 "Gly Gly Gly Gly Ser" repeating units
GGGGSGGGGSGGGGSGGGGSGGGGSGGGGS

SEQ ID NO: 1054 - protein, 9 aa, Artificial Sequence
  Description of Artificial Sequence: Synthetic peptide
GGGGSGGGS

SEQ ID NO: 1055 - protein, 7 aa, Artificial Sequence
  Description of Artificial Sequence: Synthetic peptide
GGGSGGG

SEQ ID NO: 1056 - protein, 8 aa, Artificial Sequence
  Description of Artificial Sequence: Synthetic 8xHis tag
HHHHHHHH

SEQ ID NO: 1057 - protein, 5 aa, Artificial Sequence
  Description of Artificial Sequence: Synthetic peptide
  MOD_RES (4)..(4): Any amino acid except Pro
VPGXG

SEQ ID NO: 1058 - protein, 5 aa, Artificial Sequence
  Description of Artificial Sequence: Synthetic peptide
GGGGS

SEQ ID NO: 1059 - protein, 18 aa, Artificial Sequence
  Description of Artificial Sequence: Synthetic peptide
KESGSVSSEQLAQFRSLD

SEQ ID NO: 1060 - protein, 14 aa, Artificial Sequence
  Description of Artificial Sequence: Synthetic peptide
EGKSSGSGSESKST

SEQ ID NO: 1061 - protein, 8 aa, Artificial Sequence
  Description of Artificial Sequence: Synthetic peptide
GGGGGGGG

SEQ ID NO: 1062 - protein, 12 aa, Artificial Sequence
  Description of Artificial Sequence: Synthetic peptide
GSAGSAAGSGEF

SEQ ID NO: 1063 - protein, 15 aa, Artificial Sequence
  Description of Artificial Sequence: Synthetic peptide
GGGGSGGGGSGGGGS

SEQ ID NO: 1064 - protein, 6 aa, Artificial Sequence
  Description of Artificial Sequence: Synthetic peptide
GGGGGG

SEQ ID NO: 1065 - protein, 15 aa, Artificial Sequence
  Description of Artificial Sequence: Synthetic peptide
EAAAKEAAAKEAAAK

SEQ ID NO: 1066 - protein, 15 aa, Artificial Sequence
  Description of Artificial Sequence: Synthetic peptide
  MISC_FEATURE (1)..(15): This sequence may encompass 1-3 "Glu Ala Ala Ala Lys" repeating units
EAAAKEAAAKEAAAK

SEQ ID NO: 1067 - protein, 46 aa, Artificial Sequence
  Description of Artificial Sequence: Synthetic polypeptide
AEAAAKEAAAKEAAAKEAAAKALEAEAAAKEAAAKEAAAKEAAAKA

SEQ ID NO: 1068 - protein, 5 aa, Artificial Sequence
  Description of Artificial Sequence: Synthetic peptide
PAPAP

SEQ ID NO: 1069 - protein, 12 aa, Artificial Sequence
  Description of Artificial Sequence: Synthetic peptide
AEAAAKEAAAKA

SEQ ID NO: 1070 - protein, 20 aa, Artificial Sequence
  Description of Artificial Sequence: Synthetic peptide
  MISC_FEATURE (1)..(20): This sequence may encompass 1, 2, or 4 "Gly Gly Gly Gly Ser" repeating units
GGGGSGGGGSGGGGSGGGGS

SEQ ID NO: 1071 - protein, 34 aa, Artificial Sequence
  Description of Artificial Sequence: Synthetic polypeptide
  MISC_FEATURE (1)..(34): This sequence may encompass 5-17 "Ala Pro" repeating units
APAPAPAPAPAPAPAPAPAPAPAPAPAPAPAPAP

SEQ ID NO: 1072 - protein, 17 aa, Artificial Sequence
  Description of Artificial Sequence: Synthetic peptide
VSQTSKLTRAETVFPDV

SEQ ID NO: 1073 - protein, 6 aa, Artificial Sequence
  Description of Artificial Sequence: Synthetic peptide
PLGLWA

SEQ ID NO: 1074 - protein, 6 aa, Artificial Sequence
  Description of Artificial Sequence: Synthetic peptide
RVLAEA

SEQ ID NO: 1075 - protein, 10 aa, Artificial Sequence
  Description of Artificial Sequence: Synthetic peptide
EDVVCCSMSY

SEQ ID NO: 1076 - protein, 9 aa, Artificial Sequence
  Description of Artificial Sequence: Synthetic peptide
GGIEGRGSC

SEQ ID NO: 1077 - protein, 10 aa, Artificial Sequence
  Description of Artificial Sequence: Synthetic peptide
TRHRQPRGWE

SEQ ID NO: 1078 - protein, 10 aa, Artificial Sequence
  Description of Artificial Sequence: Synthetic peptide
AGNRVRRSVG

SEQ ID NO: 1079 - protein, 9 aa, Artificial Sequence
  Description of Artificial Sequence: Synthetic peptide
RRRRRRRRR

SEQ ID NO: 1080 - protein, 4 aa, Artificial Sequence
  Description of Artificial Sequence: Synthetic peptide
GFLG

SEQ ID NO: 1081 - protein, 28 aa, Artificial Sequence
  Description of Artificial Sequence: Synthetic peptide
  MISC_FEATURE (1)..(28): This sequence may encompass 1-4 "Gly Gly Gly Ser Gly Gly Gly" repeating units
  See specification as filed for detailed description of substitutions and preferred embodiments
GGGSGGGGGGSGGGGGGSGGGGGGSGGG

SEQ ID NO: 1082 - protein, 20 aa, Artificial Sequence
  Description of Artificial Sequence: Synthetic peptide
  MISC_FEATURE (1)..(20): This sequence may encompass 1-4 "Gly Gly Ser Gly Gly" repeating units
  See specification as filed for detailed description of substitutions and preferred embodiments
GGSGGGGSGGGGSGGGGSGG

SEQ ID NO: 1083 - protein, 12 aa, Artificial Sequence
  Description of Artificial Sequence: Synthetic peptide
  MISC_FEATURE (1)..(12): This sequence may encompass 1-4 "Gly Ser Gly" repeating units
  See specification as filed for detailed description of substitutions and preferred embodiments
GSGGSGGSGGSG

SEQ ID NO: 1084 - protein, 24 aa, Artificial Sequence
  Description of Artificial Sequence: Synthetic peptide
  MISC_FEATURE (1)..(24): This sequence may encompass 1-4 "Gly Gly Gly Ser Gly Gly" repeating units
  See specification as filed for detailed description of substitutions and preferred embodiments
GGGSGGGGGSGGGGGSGGGGGSGG

SEQ ID NO: 1085 - DNA, 18 bp, Artificial Sequence
  Description of Artificial Sequence: Synthetic oligonucleotide
ttgttgayryrtcaacwa

SEQ ID NO: 1086 - DNA, 15 bp, Artificial Sequence
  Description of Artificial Sequence: Synthetic oligonucleotide
  modified_base (8)..(8): a, c, t, g, unknown or other
ttataatnattataa

SEQ ID NO: 1087 - DNA, 24 bp, Artificial Sequence
  Description of Artificial Sequence: Synthetic oligonucleotide
ggaaaatttttttaaaaaaaaaac

SEQ ID NO: 1088 - protein, 52 aa, Artificial Sequence; identical to SEQ ID NO: 395
  Description of Artificial Sequence: Synthetic polypeptide

SEQ ID NO: 1089 - protein, 40 aa, Artificial Sequence; identical to SEQ ID NO: 396
  Description of Artificial Sequence: Synthetic polypeptide

SEQ ID NO: 1090 - protein, 33 aa, Artificial Sequence; identical to SEQ ID NO: 397
  Description of Artificial Sequence: Synthetic polypeptide

SEQ ID NO: 1091 - protein, 53 aa, Artificial Sequence; identical to SEQ ID NO: 398
  Description of Artificial Sequence: Synthetic polypeptide

SEQ ID NO: 1092 - protein, 19 aa, Artificial Sequence
  Description of Artificial Sequence: Synthetic peptide
MKKIWLALAGLVLAFSASA

SEQ ID NO: 1093 - protein, 22 aa, Artificial Sequence
  Description of Artificial Sequence: Synthetic peptide
MQLRKPATAILALALSAGLAQA

SEQ ID NO: 1094 - protein, 26 aa, Artificial Sequence
  Description of Artificial Sequence: Synthetic peptide
MKIKTGARILALSALTTMMFSASALA

SEQ ID NO: 1095 - protein, 26 aa, Artificial Sequence
  Description of Artificial Sequence: Synthetic peptide
MTNITKRSLVAAGVLAALMAGNVALA

SEQ ID NO: 1096 - protein, 22 aa, Artificial Sequence
  Description of Artificial Sequence: Synthetic peptide
MKYLLPTAAAGLLLLAAQPAMA

SEQ ID NO: 1097 - protein, 21 aa, Artificial Sequence
  Description of Artificial Sequence: Synthetic peptide
MKQSTIALALLPLLFTPVTKA

SEQ ID NO: 1098 - protein, 24 aa, Artificial Sequence
  Description of Artificial Sequence: Synthetic peptide
MFKSTLAAMAAVFALSALSPAAMA

SEQ ID NO: 1099 - DNA, 159 bp, Artificial Sequence
  Description of Artificial Sequence: Synthetic polynucleotide
atgaacaagattttcaaggttatctggaaccccgcgacaggcagctacactgtggcctccgaaaccgctaagtcgcgcggcaagaagtcaggacgttcaaagctgcttatttctgctttagtagccggaggattactttctagctttggagcctcggca

SEQ ID NO: 1100 - DNA, 57 bp, Artificial Sequence
  Description of Artificial Sequence: Synthetic oligonucleotide
atgaaaaaaatctggctggcattagcaggcttagtcctggcctttagtgcctcggca

SEQ ID NO: 1101 - DNA, 66 bp, Artificial Sequence
  Description of Artificial Sequence: Synthetic oligonucleotide
atgcagttgcgcaagcctgccacggcaattttagcattagctctttctgcgggcttggcccaggca

SEQ ID NO: 1102 - DNA, 120 bp, Artificial Sequence
  Description of Artificial Sequence: Synthetic polynucleotide
atgttctggcgcgacatgacactgagcgtttggcgtaaaaaaacaacgggactgaaaaccaaaaagcgtttgttagcccttgtcctggcggcagccctgtgctcgtccccggtatgggca

SEQ ID NO: 1103 - DNA, 99 bp, Artificial Sequence
  Description of Artificial Sequence: Synthetic oligonucleotide
atgggatacaagatgaacatttcatcacttcgcaaagcttttatcttcatgggtgccgttgctgctctgtcactggtcaatgctcaatcggccctggca

SEQ ID NO: 1104 - DNA, 78 bp, Artificial Sequence
  Description of Artificial Sequence: Synthetic oligonucleotide
atgaagattaaaacaggcgctcgtattttggccctgtctgcgcttacgactatgatgtttagtgcctcggccctggca

SEQ ID NO: 1105 - DNA, 78 bp, Artificial Sequence
  Description of Artificial Sequence: Synthetic oligonucleotide
atgacgaatatcactaaacgtagccttgtggccgcgggggtcttggctgcattgatggctggcaatgttgctctggca

SEQ ID NO: 1106 - DNA, 66 bp, Artificial Sequence
  Description of Artificial Sequence: Synthetic oligonucleotide
atgaaatatctgttgcccacggctgccgcgggtctgctgctgctggcagcgcaaccggctatggca

SEQ ID NO: 1107 - DNA, 63 bp, Artificial Sequence
  Description of Artificial Sequence: Synthetic oligonucleotide
atgaagcaaagtacgatcgcccttgcgctgttgccccttcttttcacgcccgtcaccaaggca

SEQ ID NO: 1108 - DNA, 72 bp, Artificial Sequence
  Description of Artificial Sequence: Synthetic oligonucleotide
atgtttaagtctacacttgcagccatggccgcagtcttcgcactgtcagccttgagtcctgctgcaatggca

SEQ ID NO: 1109 - protein, 21 aa, Artificial Sequence
  Description of Artificial Sequence: Synthetic peptide
MKQALRVAFGFLILWASVLHA

SEQ ID NO: 1110 - protein, 18 aa, Artificial Sequence
  Description of Artificial Sequence: Synthetic peptide
MRVLLFLLLSLFMLPAFS

SEQ ID NO: 1111 - protein, 21 aa, Artificial Sequence
  Description of Artificial Sequence: Synthetic peptide
MKKTAIAIAVALAGFATVAQA

SEQ ID NO: 1112 - DNA, 57 bp, Artificial Sequence
  Description of Artificial Sequence: Synthetic oligonucleotide
atgaagaaaatttggctggcacttgccggtttggtattagcgttttccgcctcggca

SEQ ID NO: 1113 - DNA, 63 bp, Artificial Sequence
  Description of Artificial Sequence: Synthetic oligonucleotide
atgaagcaggcgcttcgcgttgcgtttgggttccttatcctgtgggcatccgtacttcacgcc

SEQ ID NO: 1114 - DNA, 54 bp, Artificial Sequence
  Description of Artificial Sequence: Synthetic oligonucleotide
atgcgcgtactgttattccttctgttgtctctttttatgttgcccgctttcagt

SEQ ID NO: 1115 - DNA, 63 bp, Artificial Sequence
  Description of Artificial Sequence: Synthetic oligonucleotide
atgaagaagactgccatcgctattgccgtcgcccttgcgggtttcgcaaccgtggcgcaagca

SEQ ID NO: 1116 - DNA, 66 bp, Artificial Sequence
  Description of Artificial Sequence: Synthetic oligonucleotide
atgaaatatctgcttccaacggctgctgctggcctgttgcttcttgccgcccagcctgcgatggct

SEQ ID NO: 1117 - DNA, 99 bp, Artificial Sequence; identical to SEQ ID NO: 491
  Description of Artificial Sequence: Synthetic oligonucleotide

SEQ ID NO: 1118 - DNA, 57 bp, Artificial Sequence
  Description of Artificial Sequence: Synthetic oligonucleotide
atgaaaaagatttggctggctcttgccggtttagtcctggcattcagcgcaagcgcg

SEQ ID NO: 1119 - DNA, 63 bp, Artificial Sequence
  Description of Artificial Sequence: Synthetic oligonucleotide
atgaaacagagcacaatcgctttagccttgctgcctcttcttttcacgcctgtcacgaaggca

SEQ ID NO: 1120 - DNA, 63 bp, Artificial Sequence
  Description of Artificial Sequence: Synthetic oligonucleotide
atgaagcaggctctgcgcgtggcatttgggttcctgatcttatgggcgtccgtcttacacgca

SEQ ID NO: 1121 - DNA, 78 bp, Artificial Sequence
  Description of Artificial Sequence: Synthetic oligonucleotide
atgaaaatcaagacgggggcacgcattcttgccttgagcgccttgacaacgatgatgttcagtgcaagtgcattagcg

SEQ ID NO: 1122 - DNA, 69 bp, Artificial Sequence
  Description of Artificial Sequence: Synthetic oligonucleotide
atgaataagaaagtcttgacattgtcggcggtcatggcctcgatgttgttcggggcagcagcccacgca

SEQ ID NO: 1123 - DNA, 66 bp, Artificial Sequence
  Description of Artificial Sequence: Synthetic oligonucleotide
atgatgaagcgtaacatcttagccgttattgtccccgcattgcttgtggccgggacggctaacgca

SEQ ID NO: 1124 - DNA, 54 bp, Artificial Sequence
  Description of Artificial Sequence: Synthetic oligonucleotide
atgcgcgtgttattgttcttgctgctgagcttgtttatgttaccagctttcagt

SEQ ID NO: 1125 - DNA, 75 bp, Artificial Sequence
  Description of Artificial Sequence: Synthetic oligonucleotide
atgatgattaccttacgcaagttgccccttgcggtagccgttgctgctggtgtgatgtccgcgcaagcaatggct

SEQ ID NO: 1126 - DNA, 66 bp, Artificial Sequence
  Description of Artificial Sequence: Synthetic oligonucleotide
atgaaatatcttcttccaacggctgctgctggtttattgcttcttgccgcccagcctgcgatggct

SEQ ID NO: 1127 - protein, 23 aa, Artificial Sequence
  Description of Artificial Sequence: Synthetic peptide
MNKKVLTLSAVMASMLFGAAAHA

SEQ ID NO: 1128 - protein, 22 aa, Artificial Sequence
  Description of Artificial Sequence: Synthetic peptide
MMKRNILAVIVPALLVAGTANA

SEQ ID NO: 1129 - protein, 25 aa, Artificial Sequence
  Description of Artificial Sequence: Synthetic peptide
MMITLRKLPLAVAVAAGVMSAQAMA

SEQ ID NO: 1130 - protein, 8 aa, Artificial Sequence
  Description of Artificial Sequence: Synthetic peptide
AGYGSTLT

SEQ ID NO: 1131 - protein, 197 aa, Artificial Sequence
  Description of Artificial Sequence: Synthetic polypeptide
RNLPVATPDPGMFPCLHHSQNLLRAVSNMLQKARQTLEFYPCTSEEIDHEDITKDKTSTVEACLPLELTKNESCLNSRETSFITNGSCLASRKTSFMMALCLSSIYEDLKMYQVEFKTMNAKLLMDPKRQIFLDQNMLAVIDELMQALNFNSETVPQKSSLEEPDFYKTKIKLCILLHAFRIRAVTIDRVMSYLNAS

SEQ ID NO: 1132 - protein, 306 aa, Artificial Sequence
  Description of Artificial Sequence: Synthetic polypeptide
IWELKKDVYVVELDWYPDAPGEMVVLTCDTPEEDGITWTLDQSSEVLGSGKTLTIQVKEFGDAGQYTCHKGGEVLSHSLLLLHKKEDGIWSTDILKDQKEPKNKTFLRCEAKNYSGRFTCWWLTTISTDLTFSVKSSRGSSDPQGVTCGAATLSAERVRGDNKEYEYSVECQEDSACPAAEESLPIEVMVDAVHKLKYENYTSSFFIRDIIKPDPPKNLQLKPLKNSRQVEVSWEYPDTWSTPHSYFSLTFCVQVQGKSKREKKDRVFTDKTSATVICRKNASISVRAQDRYYSSSWSEWASVPCS

SEQ ID NO: 1133 - protein, 313 aa, Artificial Sequence
  Description of Artificial Sequence: Synthetic polypeptide
MWELEKDVYVVEVDWTPDAPGETVNLTCDTPEEDDITWTSDQRHGVIGSGKTLTITVKEFLDAGQYTCHKGGETLSHSHLLLHKKENGIWSTEILKNFKNKTFLKCEAPNYSGRFTCSWLVQRNMDLKFNIKSSSSSPDSRAVTCGMASLSAEKVTLDQRDYEKYSVSCQEDVTCPTAEETLPIELALEARQQNKYENYSTSFFIRDIIKPDPPKNLQMKPLKNSQVEVSWEYPDSWSTPHSYFSLKFFVRIQRKKEKMKETEEGCNQKGAFLVEKTSTEVQCKGGNVCVQAQDRYYNSSCSKWACVPCRVRS

SEQ ID NO: 1134 - protein, 114 aa, Homo sapiens
NWVNVISDLKKIEDLIQSMHIDATLYTESDVHPSCKVTAMKCFLLELQVISLESGDASIHDTVENLIILANNSLSSNGNVTESGCKECEELEEKNIKEFLQSFVHIVQMFINTS

SEQ ID NO: 1135 - protein, 127 aa, Homo sapiens [sequence omitted]

SEQ ID NO: 1136 - protein, 177 aa, Homo sapiens
GPQREEFPRDLSLISPLAQAVRSSSRTPSDKPVAHVVANPQAEGQLQWLNRRANALLANGVELRDNQLVVPSEGLYLIYSQVLFKGQGCPSTHVLLTHTISRIAVSYQTKVNLLSAIKSPCQRETPEGAEAKPWYEPIYLGGVFQLEKGDRLSAEINRPDYLDFAESGQVYFGIIAL

SEQ ID NO: 1137 - protein, 138 aa, Homo sapiens
QDPYVKEAENLKKYFNAGHSDVADNGTLFLGILKNWKEESDRKIMQSQIVSFYFKLFKNFKDDQSIQKSVETIKEDMNVKFFNSNKKKRDDFEKLTNYSVTDLNVQRKAIHELIQVMAELSPAAKTGKRKRSQMLFRG

SEQ ID NO: 1138 - protein, 73 aa, Homo sapiens
VPLSRTVRCTCISISNQPVNPRSLEKLEIIPASQFCPRVEIIATMKKKGEKRCLNPESKAIKNLLKAVSKERS

SEQ ID NO: 1139 - protein, 125 aa, Homo sapiens
MKKSGVLFLLGIILLVLIGVQGTPVVRKGRCSCISTNQGTIHLQSLKDLKQFAPSPSCEKIEIIATLKNGVQTCLNPDSADVKELIKKWEKQVSQKKKQKNGKKHQKKKVLKVRKSQRSRQKKTT

SEQ ID NO: 1140 - DNA, 594 bp, Artificial Sequence
  Description of Artificial Sequence: Synthetic polynucleotide
aggaacctgcctgtggcaacaccagaccctgggatgttcccttgcttacatcattcccagaacctgttgcgtgcggtgtctaacatgctgcagaaagccaggcagacgctggaattctacccatgcacttccgaagagatagatcatgaagacattacgaaagacaaaacctcaacggttgaagcatgcttacctctggaattgactaagaatgaatcgtgcttaaactcaagagagaccagtttcatcactaatggctcttgcttagcgtcgcgcaagaccagcttcatgatggcgctctgcctaagtagcatctacgaggacctcaaaatgtaccaagttgaatttaaaactatgaatgccaaacttctaatggacccaaaaagacagatatttttagatcagaatatgcttgcggttattgacgaactcatgcaggcattgaattttaattccgagacggtgccacaaaaaagttctttggaggagccggacttttacaagacaaaaatcaagctgtgcatacttcttcacgcattcagaatacgggccgttacgatcgatcgcgtcatgtcgtatcttaatgcgagctga

SEQ ID NO: 1141 - DNA, 924 bp, Artificial Sequence
  Description of Artificial Sequence: Synthetic polynucleotide
atctgggaactgaaaaaagatgtttatgtagttgaactggattggtacccggatgcacccggtgagatggtggttttgacctgcgacacgccggaagaagatggcataacgtggaccctggatcaaagctctgaagttctgggttcaggtaagacattgacgatccaagtaaaagaatttggcgacgcaggtcagtacacctgccacaaaggtggcgaagttctgtcgcactcactcctgctcctgcacaaaaaagaggatggcatctggagtactgatatcctaaaggatcaaaaagaacctaaaaacaaaacgttcttgcgctgtgaagcgaagaactatagtggtcgctttacgtgctggtggttgactaccatttccaccgatttgaccttttctgttaagagttcgcgcggctcgtcagatccgcagggcgttacttgcggtgcggcgacgctgtcagctgagagagttcgtggggacaacaaagagtacgaatatagtgtagaatgtcaagaggattcggcgtgcccggcagcagaggagtctctccccattgaagttatggtggacgcagtgcataaactgaaatatgagaattacacatcaagcttttttattcgcgatatcatcaaaccggatcctccaaaaaatctgcaactaaagcccctgaaaaattcgcgccaagttgaggtgagctgggaatatccggatacttggtcgacaccgcattcttatttctcactgaccttctgcgttcaggttcaaggtaaatcaaaacgagaaaaaaaggatcgcgtctttaccgacaaaacgtctgctactgtaatctgccgcaagaatgcgtcaatttctgtacgtgcgcaagatcgctactactctagtagttggtctgaatgggcttcagtgccatgctcctgatga

SEQ ID NO: 1142 - DNA, 594 bp, Artificial Sequence
  Description of Artificial Sequence: Synthetic polynucleotide
cgtaaccttccggtggccacgccagatccgggcatgttcccgtgcttacaccattcccagaatctgctgcgcgctgtgagtaatatgctgcagaaggcgagacaaactttggaattttacccgtgcacttcggaggagattgaccatgaggatatcacaaaagacaaaaccagtacagtggaagcctgcctgccccttgaactgactaaaaatgagagttgtttaaattcacgcgaaaccagcttcattactaacggaagctgcttagcatcgcggaaaaccagttttatgatggccctttgcctttcatctatttacgaggaccttaaaatgtatcaagttgaatttaagactatgaacgcgaaactgctaatggatcccaagcgacaaatctttcttgatcaaaatatgttggctgttattgatgaactgatgcaagccctgaattttaactcagaaaccgtacctcagaaatcgagtttagaagaacccgatttctacaaaactaaaatcaagttgtgtatccttttacatgccttccggattcgggccgtcactattgatcgcgtgatgtcgtacttgaatgcctcctaa

SEQ ID NO: 1143 - DNA, 942 bp, Artificial Sequence
  Description of Artificial Sequence: Synthetic polynucleotide
atgtgggaattggaaaaagacgtgtatgttgttgaagttgactggactccggacgcgcctggtgaaactgttaatctgacttgtgatacaccggaggaagatgatataacttggactagcgatcaacgacacggcgtaatcggctctggtaagactttgaccattactgtgaaggaattcttggatgcggggcaatatacgtgtcataaaggcggcgagacgctgtcacactctcacctgttgttacataaaaaagagaatggtatatggtctacggagatcttgaaaaactttaaaaacaaaacttttttgaagtgtgaggctccaaactattctggtcgctttacctgtagttggttggtgcaacgtaacatggatctcaaatttaacataaagtcgtcttcgtcttctcccgatagccgagcggttacctgtggcatggctagtttgtcggcggagaaggtgaccttggatcaacgtgattatgaaaaatatagcgtttcgtgccaagaggacgttacgtgccctaccgctgaagagactttgccgattgaattggcactggaagcacgacaacaaaataaatacgagaattactcaactagtttcttcatccgagatatcataaaaccggaccccccgaagaatctgcaaatgaaaccgcttaaaaattcacaggtagaggtttcgtgggagtacccggatagttggtctacgcctcattcgtattttagcctgaaatttttcgttcgaatacagcgaaaaaaagagaagatgaaagaaactgaagaagggtgtaaccaaaaaggtgcatttctggtggagaaaactagcaccgaggttcaatgcaaaggcggtaacgtgtgcgtacaagctcaagaccgttattataacagtagctgttctaaatgggcttgcgtgccctgccgcgtgagatcatga

SEQ ID NO: 1144 - DNA, 345 bp, Artificial Sequence
  Description of Artificial Sequence: Synthetic polynucleotide
aattgggttaatgttatatctgatttgaaaaaaatagaggatctgattcaatcaatgcacatagatgcgactctgtatactgagagcgatgtgcacccgagttgcaaagttactgctatgaaatgttttctgctggagctgcaagttatctctctggagagtggtgatgcgtctattcacgatactgttgagaatctgattattctggctaataactcgctgtcaagtaatgggaatgttacggaatctggctgtaaggagtgtgaagaattagaagaaaaaaatattaaagagtttctgcagagttttgtgcacattgttcagatgtttatcaatactagctga

SEQ ID NO: 1145 - DNA, 384 bp, Artificial Sequence
  Description of Artificial Sequence: Synthetic polynucleotide
gcaccggcccgcagcccatcaccgtcaactcaaccttgggaacatgtaaatgctattcaagaagctcgccgcctgttgaatttgagtcgcgatactgcagcagagatgaatgagactgtagaggtgatttcagaaatgtttgacctgcaggagccgacttgtttgcaaactcgcctggagctgtacaaacaaggcctgcgtggctcgctgactaaactgaaaggtcctctgacgatgatggcttctcattataaacaacactgcccgcctactccggagacgtcttgcgcgacccagataattacttttgaatcttttaaagagaatctgaaagactttctgctggttatcccgtttgattgttgggaaccggttcaagaataa

SEQ ID NO: 1146 - DNA, 534 bp, Artificial Sequence
  Description of Artificial Sequence: Synthetic polynucleotide
ggtccgcagagggaagaattcccgcgcgatttgagcctgatttcacctcttgctcaggctgtccgctcctcttcgcgtaccccctcggataaacctgtcgcgcacgtggttgcgaacccgcaagcggaagggcagctgcaatggttaaaccgccgggctaatgcactgctggctaatggagttgagttacgcgacaaccaacttgtcgttccttcggaagggctgtatctgatctattcacaggttctctttaaagggcagggttgcccatcaacccacgtgctcctgacacacacgatcagtcgtatcgcggtatcctatcagacgaaagttaacctcctgtcagcgattaaatcgccgtgtcagagagaaactccagagggtgcggaagctaaaccgtggtatgaacctatttatcttggtggagttttccagttggaaaaaggtgatagactgtcggcagagatcaatcgccctgattacctggatttcgctgagtcgggtcaggtttatttcggaattattgcactgtga

SEQ ID NO: 1147 - DNA, 417 bp, Artificial Sequence
  Description of Artificial Sequence: Synthetic polynucleotide
caggatccttacgttaaagaagcagagaatctgaaaaaatactttaatgcaggccacagcgatgtggcagataatggcacgttattcctgggcattctgaaaaattggaaagaagaatctgaccggaagatcatgcaatctcagatcgtatcattttatttcaagttgtttaaaaacttcaaggatgaccagtcgattcaaaaatcagtggaaacgatcaaagaagatatgaacgttaagttcttcaactcaaataaaaaaaaacgcgatgatttcgaaaaactgactaattattcggtaactgatttgaatgttcagcgcaaggcgattcatgaattgattcaggttatggcagaactgtcgccagcggcaaaaacgggtaaacgaaaacgttctcagatgttgtttcgtggttga

SEQ ID NO: 1148 - DNA, 222 bp, Artificial Sequence
  Description of Artificial Sequence: Synthetic polynucleotide
gtgcccctgagccgcaccgtgcgttgtacgtgtatctccatctcaaaccagccggtaaacccgcgtagtttagaaaaactggagattatcccagccagccagttttgcccgcgcgttgagattattgcgaccatgaagaaaaaaggggaaaaacgttgccttaatccagaaagtaaggctatcaaaaacctgttgaaagctgtctcgaaagagcgttcctaa

SEQ ID NO: 1149 - protein, 95 aa, Artificial Sequence
  Description of Artificial Sequence: Synthetic polypeptide
MMKRNILAVIVPALLVAGTANAVPLSRTVRCTCISISNQPVNPRSLEKLEIIPASQFCPRVEIIATMKKKGEKRCLNPESKAIKNLLKAVSKERS

SEQ ID NO: 1150 - protein, 94 aa, Artificial Sequence
  Description of Artificial Sequence: Synthetic polypeptide
MKQSTIALALLPLLFTPVTKAVPLSRTVRCTCISISNQPVNPRSLEKLEIIPASQFCPRVEIIATMKKKGEKRCLNPESKAIKNLLKAVSKERS

SEQ ID NO: 1151 - protein, 112 aa, Artificial Sequence
  Description of Artificial Sequence: Synthetic polypeptide
MNNNDLFQASRRRFLAQLGGLTVAGMLGPSLLTPRRATAVPLSRTVRCTCISISNQPVNPRSLEKLEIIPASQFCPRVEIIATMKKKGEKRCLNPESKAIKNLLKAVSKERS

SEQ ID NO: 1152 - protein, 125 aa, Artificial Sequence
  Description of Artificial Sequence: Synthetic polypeptide
MMKRNILAVIVPALLVAGTANATPVVRKGRCSCISTNQGTIHLQSLKDLKQFAPSPSCEKIEIIATLKNGVQTCLNPDSADVKELIKKWEKQVSQKKKQKNGKKHQKKKVLKVRKSQRSRQKKTT

SEQ ID NO: 1153 - protein, 124 aa, Artificial Sequence
  Description of Artificial Sequence: Synthetic polypeptide
MKQSTIALALLPLLFTPVTKATPVVRKGRCSCISTNQGTIHLQSLKDLKQFAPSPSCEKIEIIATLKNGVQTCLNPDSADVKELIKKWEKQVSQKKKQKNGKKHQKKKVLKVRKSQRSRQKKTT

SEQ ID NO: 1154 - protein, 142 aa, Artificial Sequence
  Description of Artificial Sequence: Synthetic polypeptide
MNNNDLFQASRRRFLAQLGGLTVAGMLGPSLLTPRRATATPVVRKGRCSCISTNQGTIHLQSLKDLKQFAPSPSCEKIEIIATLKNGVQTCLNPDSADVKELIKKWEKQVSQKKKQKNGKKHQKKKVLKVRKSQRSRQKKTT

SEQ ID NO: 1155 - protein, 126 aa, Artificial Sequence
  Description of Artificial Sequence: Synthetic polypeptide
MKQSTIALALLPLLFTPVTKATLVIRNARCSCISTSRGTIHYKSLKDLKQFAPSPNCNKTEIIATLKNGDQTCLDPDSANVKKLMKEWEKKISQKKKQKRGKKHQKNMKNRKPKTPQSRRRSRKTT

SEQ ID NO: 1156 - protein, 127 aa, Artificial Sequence
  Description of Artificial Sequence: Synthetic polypeptide
MMKRNILAVIVPALLVAGTANATLVIRNARCSCISTSRGTIHYKSLKDLKQFAPSPNCNKTEIIATLKNGDQTCLDPDSANVKKLMKEWEKKISQKKKQKRGKKHQKNMKNRKPKTPQSRRRSRKTT

SEQ ID NO: 1157 - protein, 144 aa, Artificial Sequence
  Description of Artificial Sequence: Synthetic polypeptide
MNNNDLFQASRRRFLAQLGGLTVAGMLGPSLLTPRRATATLVIRNARCSCISTSRGTIHYKSLKDLKQFAPSPNCNKTEIIATLKNGDQTCLDPDSANVKKLMKEWEKKISQKKKQKRGKKHQKNMKNRKPKTPQSRRRSRKTT

SEQ ID NO: 1158 - DNA, 285 bp, Artificial Sequence
  Description of Artificial Sequence: Synthetic polynucleotide
atgaagcagagcaccatcgcgcttgccctgctgccgttgcttttcacgcctgtcaccaaggctgtgcccctgagccgcaccgtgcgttgtacgtgtatctccatctcaaaccagccggtaaacccgcgtagtttagaaaaactggagattatcccagccagccagttttgcccgcgcgttgagattattgcgaccatgaagaaaaaaggggaaaaacgttgccttaatccagaaagtaaggctatcaaaaacctgttgaaagctgtctcgaaagagcgttcctaa

SEQ ID NO: 1159 - DNA, 297 bp, Artificial Sequence
  Description of Artificial Sequence: Synthetic polynucleotide
atgaagcagagcaccatcgcgcttgccctgctgccgttgcttttcacgcctgtcaccaaggctatcccactggctcgcacagtccgctgtaattgcatccacatcgatgacggtcctgtgcgtatgcgtgcaatcggtaaacttgaaattatccctgcctccttatcgtgtccccgcgtagagattatcgccacgatgaagaaaaacgatgaacagcgttgtcttaacccagagagcaaaactatcaaaaacctgatgaaggcttttagtcaaaagcgcagtaagcgcgcaccataa

SEQ ID NO: 1160 - DNA, 375 bp, Artificial Sequence
  Description of Artificial Sequence: Synthetic polynucleotide
atgaagcagagcaccatcgcgcttgccctgctgccgttgcttttcacgcctgtcaccaaggctacacccgtagtgcgtaaagggcgctgcagttgcatctcgactaaccaggggacaatccacctgcagtcgctgaaagatttgaagcagtttgcaccgagccctagttgtgaaaaaatcgagatcatcgctacattaaagaacggcgtccaaacatgtcttaaccccgactcagcagatgttaaagaacttattaagaaatgggagaagcaggtaagtcagaaaaagaaacagaaaaatggcaagaaacatcagaaaaagaaagtcttaaaggttcgtaaatcgcagcgttctcgtcaaaagaagacgacgtaa

SEQ ID NO: 1161 - DNA, 381 bp, Artificial Sequence
  Description of Artificial Sequence: Synthetic polynucleotide
atgaagcagagcaccatcgcgcttgccctgctgccgttgcttttcacgcctgtcaccaaggctacgctggtgatccgtaacgcccgctgttcatgcatcagcacttctcgtggaaccatccactataaatcattaaaggacttgaaacagtttgcaccttcaccaaattgtaacaagacggaaattattgctactctgaaaaacggagatcaaacttgcctggaccccgactctgcaaacgtgaagaagctgatgaaggaatgggaaaaaaaaatctctcaaaagaaaaagcaaaagcgcggtaagaaacatcagaagaacatgaagaatcgtaagccaaagacccctcagtcgcgccgtcgttctcgtaagacgacgtaa

SEQ ID NO: 1162 - DNA, 1192 bp, Artificial Sequence
  Description of Artificial Sequence: Synthetic polynucleotide
ccaggatacatagattaccacaactccgagcccttccaccttaagacccactttcacatttaagttgtttttctaatccgcatatgatcaattcaaggccgaataagaaggctggctctgcaccttggtgatcaaataattcgatagcttgtcgtaataatggcggcatactatcagtagtaggtgtttccctttcttctttagcgacttgatgctcttgatcttccaatacgcaacctaaagtaaaatgccccacagcgctgagtgcatataatgcattctctagtgaaaaaccttgttggcataaaaaggctaattgattttcgagagtttcatactgtttttctgtaggccgtgtacctaaatgtacttttgctccatcgcgatgacttagtaaagcacatctaaaacttttagcgttattacgtaaaaaatcttgccagctttccccttctaaagggcaaaagtgagtatggtgcctatctaacatctcaatggctaaggcgtcgagcaaagcccgcttattttttacatgccaatacaatgtaggctgctctacacctagcttctgggcgagtttacgggttgttaaaccttcgattccgacctcattaagcagctctaatgcgctgttaatcactttacttttatctaatctagacatcattaattcctaatttttgttgacactctatcattgatagagttattttaccactccctatcagtgatagagaaaagtgaaataagtttatcaaaataaaaggaggtaatatatgaagcagagcaccatcgcgcttgccctgctgccgttgcttttcacgcctgtcaccaaggctgtgcccctgagccgcaccgtgcgttgtacgtgtatctccatctcaaaccagccggtaaacccgcgtagtttagaaaaactggagattatcccagccagccagttttgcccgcgcgttgagattattgcgaccatgaagaaaaaaggggaaaaacgttgccttaatccagaaagtaaggctatcaaaaacctgttgaaagctgtctcgaaagagcgttcctaaaacgattggtaaacccggtgaacgcatgagaaagcccccggaagatcaccttccgggggcttttttattgcgcggaccaaaacgaaaaaagacgctcgaaagcgtctcttttctggaatttggtaccgagg

SEQ ID NO: 1163 - DNA, 1204 bp, Artificial Sequence
  Description of Artificial Sequence: Synthetic polynucleotide
ccaggatacatagattaccacaactccgagcccttccaccttaagacccactttcacatttaagttgtttttctaatccgcatatgatcaattcaaggccgaataagaaggctggctctgcaccttggtgatcaaataattcgatagcttgtcgtaataatggcggcatactatcagtagtaggtgtttccctttcttctttagcgacttgatgctcttgatcttccaatacgcaacctaaagtaaaatgccccacagcgctgagtgcatataatgcattctctagtgaaaaaccttgttggcataaaaaggctaattgattttcgagagtttcatactgtttttctgtaggccgtgtacctaaatgtacttttgctccatcgcgatgacttagtaaagcacatctaaaacttttagcgttattacgtaaaaaatcttgccagctttccccttctaaagggcaaaagtgagtatggtgcctatctaacatctcaatggctaaggcgtcgagcaaagcccgcttattttttacatgccaatacaatgtaggctgctctacacctagcttctgggcgagtttacgggttgttaaaccttcgattccgacctcattaagcagctctaatgcgctgttaatcactttacttttatctaatctagacatcattaattcctaatttttgttgacactctatcattgatagagttattttaccactccctatcagtgatagagaaaagtgaaataagtttatcaaaataaaaggaggtaatatatgaagcagagcaccatcgcgcttgccctgctgccgttgcttttcacgcctgtcaccaaggctatcccactggctcgcacagtccgctgtaattgcatccacatcgatgacggtcctgtgcgtatgcgtgcaatcggtaaacttgaaattatccctgcctccttatcgtgtccccgcgtagagattatcgccacgatgaagaaaaacgatgaacagcgttgtcttaacccagagagcaaaactatcaaaaacctgatgaaggcttttagtcaaaagcgcagtaagcgcgcaccataaaacgattggtaaacccggtgaacgcatgagaaagcccccggaagatcaccttccgggggcttttttattgcgcggaccaaaacgaaaaaagacgctcgaaagcgtctcttttctggaatttggtaccgagg

SEQ ID NO: 1164 - DNA, 1282 bp, Artificial Sequence
  Description of Artificial Sequence: Synthetic polynucleotide
ccaggatacatagattaccacaactccgagcccttccaccttaagacccactttcacatttaagttgtttttctaatccgcatatgatcaattcaaggccgaataagaaggctggctctgcaccttggtgatcaaataattcgatagcttgtcgtaataatggcggcatactatcagtagtaggtgtttccctttcttctttagcgacttgatgctcttgatcttccaatacgcaacctaaagtaaaatgccccacagcgctgagtgcatataatgcattctctagtgaaaaaccttgttggcataaaaaggctaattgattttcgagagtttcatactgtttttctgtaggccgtgtacctaaatgtacttttgctccatcgcgatgacttagtaaagcacatctaaaacttttagcgttattacgtaaaaaatcttgccagctttccccttctaaagggcaaaagtgagtatggtgcctatctaacatctcaatggctaaggcgtcgagcaaagcccgcttattttttacatgccaatacaatgtaggctgctctacacctagcttctgggcgagtttacgggttgttaaaccttcgattccgacctcattaagcagctctaatgcgctgttaatcactttacttttatctaatctagacatcattaattcctaatttttgttgacactctatcattgatagagttattttaccactccctatcagtgatagagaaaagtgaaataagtttatcaaaataaaaggaggtaatatatgaagcagagcaccatcgcgcttgccctgctgccgttgcttttcacgcctgtcaccaaggctacacccgtagtgcgtaaagggcgctgcagttgcatctcgactaaccaggggacaatccacctgcagtcgctgaaagatttgaagcagtttgcaccgagccctagttgtgaaaaaatcgagatcatcgctacattaaagaacggcgtccaaacatgtcttaaccccgactcagcagatgttaaagaacttattaagaaatgggagaagcaggtaagtcagaaaaagaaacagaaaaatggcaagaaacatcagaaaaagaaagtcttaaaggttcgtaaatcgcagcgttctcgtcaaaagaagacgacgtaaaacgattggtaaacccggtgaacgcatgagaaagcccccggaagatcaccttccgggggcttttttattgcgcggaccaaaacgaaaaaagacgctcgaaagcgtctcttttctggaatttggtaccgagg

SEQ ID NO: 1165 - DNA, 1288 bp, Artificial Sequence
  Description of Artificial Sequence: Synthetic polynucleotide
ccaggatacatagattaccacaactccgagcccttccaccttaagacccactttcacatttaagttgtttttctaatccgcatatgatcaattcaaggccgaataagaaggctggctctgcaccttggtgatcaaataattcgatagcttgtcgtaataatggcggcatactatcagtagtaggtgtttccctttcttctttagcgacttgatgctcttgatcttccaatacgcaacctaaagtaaaatgccccacagcgctgagtgcatataatgcattctctagtgaaaaaccttgttggcataaaaaggctaattgattttcgagagtttcatactgtttttctgtaggccgtgtacctaaatgtacttttgctccatcgcgatgacttagtaaagcacatctaaaacttttagcgttattacgtaaaaaatcttgccagctttccccttctaaagggcaaaagtgagtatggtgcctatctaacatctcaatggctaaggcgtcgagcaaagcccgcttattttttacatgccaatacaatgtaggctgctctacacctagcttctgggcgagtttacgggttgttaaaccttcgattccgacctcattaagcagctctaatgcgctgttaatcactttacttttatctaatctagacatcattaattcctaatttttgttgacactctatcattgatagagttattttaccactccctatcagtgatagagaaaagtgaaataagtttatcaaaataaaaggaggtaatatatgaagcagagcaccatcgcgcttgccctgctgccgttgcttttcacgcctgtcaccaaggctacgctggtgatccgtaacgcccgctgttcatgcatcagcacttctcgtggaaccatccactataaatcattaaaggacttgaaacagtttgcaccttcaccaaattgtaacaagacggaaattattgctactctgaaaaacggagatcaaacttgcctggaccccgactctgcaaacgtgaagaagctgatgaaggaatgggaaaaaaaaatctctcaaaagaaaaagcaaaagcgcggtaagaaacatcagaagaacatgaagaatcgtaagccaaagacccctcagtcgcgccgtcgttctcgtaagacgacgtaaaacgattggtaaacccggtgaacgcatgagaaagcccccggaagatcaccttccgggggcttttttattgcgcggaccaaaacgaaaaaagacgctcgaaagcgtctcttttctggaatttggtaccgagg

SEQ ID NO: 1166 - protein, 6 aa, Artificial Sequence
  Description of Artificial Sequence: Synthetic 6xHis tag
HHHHHH

SEQ ID NO: 1167 - DNA, 858 bp, Artificial Sequence
  Description of Artificial Sequence: Synthetic polynucleotide
aaacaatcgaccatcgcattggcgctgcttcctctattgttcacaccggtgacaaaggcagtcgactataaggatgacgacgacaagcaattgggcggtggccaccgtcgtttggacaaggtggaggaggaagtcaacttgcatgaagattttgtatttatcaagaaattaaagcgttgtaacaagggtgaagggagcttgagtttacttaactgtgaagaaatgcgccgccaattcgaggacttggttaaggacattacccttaacaaggaagaaaagaaagagaacagcttcgaaatgcagcgtggcgatgaagacccccagatcgcggcacatgtcgtttccgaggcaaattcgaatgctgcttcagtcttacaatgggcgaaaaagggctactacacgatgaagtcaaacttagtgatgcttgaaaatggcaagcaattaaccgtgaagcgcgaaggattgtattatgtctacacccaagtaacattttgctccaatcgcgaaccgtcgtcgcagcgccctttcatcgttggtttgtggttgaagccgagctccggttccgagcgtattcttttgaaagccgcaaacacccacagcagctcgcagctgtgtgaacagcagagcgtccacctgggcggcgtatttgaattgcaagcgggagcgtcagttttcgttaatgtgactgaggcttctcaagttatccatcgtgtcggtttctccagcttcggcttactgaagttaaagggcgagctcaattcgaagcttgaaggtaagcctatccctaaccctctcctcggcctcgattctacggatccgaattcgagctccgtcgaccatcaccatcaccaccactga

SEQ ID NO: 1168 - DNA, 791 bp, Artificial Sequence
  Description of Artificial Sequence: Synthetic polynucleotide
tgactagtaaacaatcgaccatcgcattggcgctgcttcctctattgttcacaccggtgacaaaggcagtcgactataaggatgacgacgacaagcaattgggcggtggcatgcaacgtggcgatgaggacccgcaaattgccgcgcatgttgtgtccgaagcgaactccaatgccgcatccgtcctgcaatgggctaagaaaggctattacacgatgaaatcaaacctggttatgcttgagaacggaaagcagcttacagtcaagcgtgagggcctgtattacgtctacacccaagttaccttttgctctaaccgtgagcccagcagccaacgcccttttattgtaggcctgtggttaaagccctcgtcgggttctgaacgcattcttctgaaagctgcgaatacgcactctagtagccagctgtgtgagcaacaatctgtccatcttggtggagtttttgagttacaagctggagcatctgtgttcgtgaatgtaacggaagcatctcaagttatccaccgtgtaggcttctcatcttttggtttattaaaattaaagggcgagctcaattcgaagcttgaaggtaagcctatccctaaccctctcctcggcctcgattctacggatccgaattcgagctccgtcgaccatcaccatcaccaccactgagcatgctaatcagccgtggaattcggtctcaggaggatcagttctggaccagcgagctgtgctgcgactcgtggcgtaatcatggtcatagctgtttcctgtgtgaaattgttatccgct

SEQ ID NO: 1169 - protein, 288 aa, Artificial Sequence
  Description of Artificial Sequence: Synthetic polypeptide
MTSKQSTIALALLPLLFTPVTKAVDYKDDDDKQLGGGHRRLDKVEEEVNLHEDFVFIKKLKRCNKGEGSLSLLNCEEMRRQFEDLVKDITLNKEEKKENSFEMQRGDEDPQIAAHVVSEANSNAASVLQWAKKGYYTMKSNLVMLENGKQLTVKREGLYYVYTQVTFCSNREPSSQRPFIVGLWLKPSSGSERILLKAANTHSSSQLCEQQSVHLGGVFELQAGASVFVNVTEASQVIHRVGFSSFGLLKLKGELNSKLEGKPIPNPLLGLDSTDPNSSSVDHHHHHH

SEQ ID NO: 1170 - protein, 223 aa, Artificial Sequence
  Description of Artificial Sequence: Synthetic polypeptide
MTSKQSTIALALLPLLFTPVTKAVDYKDDDDKQLGGGMQRGDEDPQIAAHVVSEANSNAASVLQWAKKGYYTMKSNLVMLENGKQLTVKREGLYYVYTQVTFCSNREPSSQRPFIVGLWLKPSSGSERILLKAANTHSSSQLCEQQSVHLGGVFELQAGASVFVNVTEASQVIHRVGFSSFGLLKLKGELNSKLEGKPIPNPLLGLDSTDPNSSSVDHHHHHH

SEQ ID NO: 1171 - protein, 215 aa, Homo sapiens
HRRLDKIEDERNLHEDFVFMKTIQRCNTGERSLSLLNCEEIKSQFEGFVKDIMLNKEETKKENSFEMQKGDQNPQIAAHVISEASSKTTSVLQWAEKGYYTMSNNLVTLENGKQLTVKRQGLYYIYAQVTFCSNREASSQAPFIASLCLKSPGRFERILLRAANTHSSAKPCGQQSIHLGGVFELQPGASVFVNVTDPSQVSHGTGFTSFGLLKL

SEQ ID NO: 1172 - DNA, 1251 bp, Artificial Sequence
  Description of Artificial Sequence: Synthetic polynucleotide
atgactagtaaacaatcgaccatcgcattggcgctgcttcctctattgttcacaccggtgacaaaggcagtcgactataaggatgacgacgacaagcaattgggcggtggcaaggaactgaaagtcacccagcctgagaagtctgtctcagtagcggcaggtgacagcacggtgcttaactgcacgcttacttcactgctgccggtaggtcccattaaatggtatcgtggcgtgggccaaagtcgtttgttaatctactcctttacgggtgagcactttccgcgcgtaactaatgtaagcgacgcaacaaaacgtaacaacatggatttcagcattcgcatctcaaacgtcactcccgaggatgctgggacttactactgcgtaaaatttcagaaaggcccctcagagcccgatacagaaatccaatcaggaggcggcacagaagtctacgttctggcaaaaccctctccccctgaagtctccggtccagcagatcgtggcattcctgaccaaaaagtaaatttcacgtgcaaatcgcacgggtttagcccacgcaacatcacactgaagtggtttaaagatggtcaggaacttcatcaccttgagactaccgtgaacccgtccggtaaaaacgtttcctacaatatctcgtccactgtgcgtgttgtattgaatagcatggacgttcacagcaaggtgatctgtgaagtcgctcacattacccttgaccgttcaccattgcgtggtatcgcgaacctgagcaatttcatccgtgtcagcccgacggttaaggttactcagcagtccccaacatcgatgaaccaggtaaatctgacgtgtcgtgcagaacgtttttaccctgaagacctgcagttgatttggctggagaacgggaacgtctcgcgcaatgacacacccaaaaatctgacaaagaatactgacggtacgtacaattatacatcactgtttcttgtgaactcctccgcccatcgcgaggacgtagtctttacatgtcaagtcaagcacgatcagcagcccgcgatcacccgtaatcacacagttctgggcctggctcactcatccgatcagggatcaatgcaaacatttccgggaaacaatgcaacccacaactggaataagggcgagctcaattcgaagcttgaaggtaagcctatccctaaccctctcctcggcctcgattctacggatccgaattcgagctccgtcgaccatcaccatcaccaccactga

SEQ ID NO: 1173 - DNA, 564 bp, Artificial Sequence
  Description of Artificial Sequence: Synthetic polynucleotide
atgactagtaaacaatcgaccatcgcattggcgctgcttcctctattgttcacaccggtgacaaaggcagtcgactataaggatgacgacgacaagcaattgggtggtagcgaagaagaactgcagattatccaaccggacaaatctgttctggtggctgcgggtgaaacggctactttgcgctgcacaatcacctcgctgtttccagtcggaccaatccaatggttccgtggtgcgggaccgggtcgcgtgttgatctacaatcagcgtcaaggccctttcccccgtgttactactgtctccgatacaacaaagcgcaacaacatggacttttccatccgtatcgggaatatcacaccggccgacgcgggaacctattattgcatcaagtttcgcaagggatctccagacgatgttgaatttaagagcggggctggaactgagctgtccgtgcgtgcaaaaccttcgggcagcggcgagctcggtggcagtggtaagcctatccctaaccctctcctcggcctcgattctacgggatccggtcatcatcaccatcaccattga

SEQ ID NO: 1174 - DNA, 357 bp, Artificial Sequence
  Description of Artificial Sequence: Synthetic polynucleotide
gaagaagaactgcagattatccaaccggacaaatctgttctggtggctgcgggtgaaacggctactttgcgctgcacaatcacctcgctgtttccagtcggaccaatccaatggttccgtggtgcgggaccgggtcgcgtgttgatctacaatcagcgtcaaggccctttcccccgtgttactactgtctccgatacaacaaagcgcaacaacatggacttttccatccgtatcgggaatatcacaccggccgacgcgggaacctattattgcatcaagtttcgcaagggatctccagacgatgttgaatttaagagcggggctggaactgagctgtccgtgcgtgcaaaaccttcg

SEQ ID NO: 1175 - DNA, 945 bp, Artificial Sequence
  Description of Artificial Sequence: Synthetic polynucleotide
atgactagtaaacaatcgaccatcgcattggcgctgcttcctctattgttcacaccggtgacaaaggcagtcgactataaggatgacgacgacaagcaattgggtggtagcgaggaggaagtgcaaatcattcaacccgacaaaagcgttagtgtcgcggcgggtgagtccgccatcctgcattgcactatcacatccctgtttcccgtaggtcccattcaatggtttcgtggagccggtccggcgcgtgttcttatctacaatcaacgccagggacccttcccgcgtgttacaacgatcagtgaaactacccgtcgtgaaaacatggactttagcatttcgatctccaacattacacccgctgacgcagggacgtactactgcatcaagtttcgtaaaggatctccagacactgagtttaagtctggcgcagggacggagttgtccgtgcgtgcgaaaccttctggcggaggagggtcggggggcggtggttctgaagaggaagttcagattatccaaccagataaatcagtgtccgtggcggcgggagagtcagctatccttcactgtacaatcacatcgttattccctgtagggccaattcagtggttccgtggggcaggacccgcacgtgtccttatctataatcagcgtcaggggcccttcccacgtgttacgacaatttcagagactactcgccgcgagaacatggacttcagtattagcatctcgaacattaccccggcggacgcgggaacttattactgtatcaagtttcgtaaaggctcgccggacaccgagttcaaatccggggcaggcactgagttgagcgtgcgtgcgaaaccatcgggcagcggcgagctcggtggcagtggtaagcctatccctaaccctctcctcggcctcgattctacgggatccggtcatcatcaccatcaccattga

SEQ ID NO: 1176 - DNA, 1224 bp, Artificial Sequence
  Description of Artificial Sequence: Synthetic polynucleotide
atgactagtaaacaatcgaccatcgcattggcgctgcttcctctattgttcacaccggtgacaaaggcacaattgggtggtagcgaggaggagttacaaattatccaaccagataagtctgtcttggtcgcagccggagaaacggcgacgttacgctgcacaatcacctcactgttcccggtcggtccgattcagtggttccgtggagctggtccgggccgtgtcttaatttacaatcaacgtcaaggaccttttccacgcgtaacaactgtttctgacacaaccaaacgtaacaatatggacttttctattcgtattggcaacattacgccagccgatgcaggtacatactactgtatcaaattccgtaaaggtagtcctgatgacgttgagtttaaaagcggcgcagggacggagctttcagtgcgtgcaaagcccagtgctagcgcggcggcgccgccatgcccgccatgccctgcgcccgagttcttgggtgggccttcagtgttcctttttcccccgaaaccaaaagataccctgatgatttcgcgcacccctgaagttacttgtgtggttgttgacgtctcacaagaggacccagaggtacaattcaactggtatgtggacggagtagaggtgcataacgccaagactaagccccgtgaagagcagttcaattctacataccgtgtagtttcggttttaacggtcttacaccaagattggttgaacggaaaggaatataagtgcaaggtgtccaataagggactgccaagcagtatcgaaaaaacaatctcaaaagcaaagggacaaccgcgtgagccccaggtttacactctgccaccgtcgcaagaggagatgacgaagaatcaggtgtcgttaacctgtttggtcaaaggcttttatccaagcgatatcgcagtggaatgggaatcaaatgggcagcctgaaaataactataagacaaccccgcctgtacttgattctgatggatctttttttctttatagtcgcttaaccgtggataaatcccgttggcaggaaggtaatgtcttctcatgctcggttatgcacgaggcccttcataaccattacactcagaagagcctttctctgagtccggggaaaggcagcggcgagctcggtggcagtggtaagcctatccctaaccctctcctcggcctcgattctacgggatccggtcatcatcaccatcaccattga

SEQ ID NO: 1177 - DNA, 1128 bp, Artificial Sequence
  Description of Artificial Sequence: Synthetic polynucleotide
atgactagtaaacaatcgaccatcgcattggcgctgcttcctctattgttcacaccggtgacaaaggcacaattgggtggtagcgaggaggagttacaaattatccaaccagataagtctgtcttggtcgcagccggagaaacggcgacgttacgctgcacaatcacctcactgttcccggtcggtccgattcagtggttccgtggagctggtccgggccgtgtcttaatttacaatcaacgtcaaggaccttttccacgcgtaacaactgtttctgacacaaccaaacgtaacaatatggacttttctattcgtattggcaacattacgccagccgatgcaggtacatactactgtatcaaattccgtaaaggtagtcctgatgacgttgagtttaaaagcggcgcagggacggagctttcagtgcgtgcaaagcccagtgctagcgcggcggcgccgccatgcccgccatgccctgcgcccgagttcttgggtgggccttcagtgttcctttttcccccgaaaccaaaagataccctgatgatttcgcgcacccctgaagttacttgtgtggttgttgacgtctcacaagaggacccagaggtacaattcaactggtatgtggacggagtagaggtgcataacgccaagactaagccccgtgaagagcagttcaattctacataccgtgtagtttcggttttaacggtcttacaccaagattggttgaacggaaaggaatataagtgcaaggtgtccaataagggactgccaagcagtatcgaaaaaacaatctcaaaagcaaagggacaaccgcgtgagccccaggtttacactctgccaccgtcgcaagaggagatgacgaagaatcaggtgtcgttaacctgtttggtcaaaggcttttatccaagcgatatcgcagtggaatgggaatcaaatgggcagcctgaaaataactataagacaaccccgcctgtacttgattctgatggatctttttttctttatagtcgcttaaccgtggataaatcccgttggcaggaaggtaatgtcttctcatgctcggttatgcacgaggcccttcataaccattacactcagaagagcctttctctgagtccggggaaa

SEQ ID NO: 1178 - DNA, 1191 bp, Artificial Sequence
  Description of Artificial Sequence: Synthetic polynucleotide
atgactagtaaacaatcgaccatcgcattggcgctgcttcctctattgttcacaccggtgacaaaggcacaattgggtggtagcgaagaagaggtgcagatcatccaacccgataaatcggtatctgtcgcagctggggagtcggcgattttgcattgcaccattacatctttgttccctgttgggcctattcaatggtttcgcggggcaggtccggcccgcgtattgatttataaccagcgtcaaggaccgttcccccgtgttacaactatttcggaaacaacacgtcgtgaaaatatggatttctcgatctctatctctaacattactcccgccgatgcagggacttattattgcattaaatttcgcaaaggaagccccgacacggagtttaagagtggagcgggcacggaattatcggtgcgcgcgaaacccagtgctagcgcggcggcgccgccatgcccgccatgccctgcgcccgagttcttgggtgggccttcagtgttcctttttcccccgaaaccaaaagataccctgatgatttcgcgcacccctgaagttacttgtgtggttgttgacgtctcacaagaggacccagaggtacaattcaactggtatgtggacggagtagaggtgcataacgccaagactaagccccgtgaagagcagttcaattctacataccgtgtagtttcggttttaacggtcttacaccaagattggttgaacggaaaggaatataagtgcaaggtgtccaataagggactgccaagcagtatcgaaaaaacaatctcaaaagcaaagggacaaccgcgtgagccccaggtttacactctgccaccgtcgcaagaggagatgacgaagaatcaggtgtcgttaacctgtttggtcaaaggcttttatccaagcgatatcgcagtggaatgggaatcaaatgggcagcctgaaaataactataagacaaccccgcctgtacttgattctgatggatctttttttctttatagtcgcttaaccgtggataaatcccgttggcaggaaggtaatgtcttctcatgctcggttatgcacgaggcccttcataaccattacactcagaagagcctttctctgagtccggggaaaggcagcggcgagctcggtggcagtggtaagcctatccctaaccctctcctcggcctcgattctacg

SEQ ID NO: 1179 - DNA, 1041 bp, Artificial Sequence
  Description of Artificial Sequence: Synthetic polynucleotide
gaagaagaggtgcagatcatccaacccgataaatcggtatctgtcgcagctggggagtcggcgattttgcattgcaccattacatctttgttccctgttgggcctattcaatggtttcgcggggcaggtccggcccgcgtattgatttataaccagcgtcaaggaccgttcccccgtgttacaactatttcggaaacaacacgtcgtgaaaatatggatttctcgatctctatctctaacattactcccgccgatgcagggacttattattgcattaaatttcgcaaaggaagccccgacacggagtttaagagtggagcgggcacggaattatcggtgcgcgcgaaacccagtgctagcgcggcggcgccgccatgcccgccatgccctgcgcccgagttcttgggtgggccttcagtgttcctttttcccccgaaaccaaaagataccctgatgatttcgcgcacccctgaagttacttgtgtggttgttgacgtctcacaagaggacccagaggtacaattcaactggtatgtggacggagtagaggtgcataacgccaagactaagccccgtgaagagcagttcaattctacataccgtgtagtttcggttttaacggtcttacaccaagattggttgaacggaaaggaatataagtgcaaggtgtccaataagggactgccaagcagtatcgaaaaaacaatctcaaaagcaaagggacaaccgcgtgagccccaggtttacactctgccaccgtcgcaagaggagatgacgaagaatcaggtgtcgttaacctgtttggtcaaaggcttttatccaagcgatatcgcagtggaatgggaatcaaatgggcagcctgaaaataactataagacaaccccgcctgtacttgattctgatggatctttttttctttatagtcgcttaaccgtggataaatcccgttggcaggaaggtaatgtcttctcatgctcggttatgcacgaggcccttcataaccattacactcagaagagcctttctctgagtccggggaaa

SEQ ID NO: 1180 - DNA, 681 bp, Artificial Sequence
  Description of Artificial Sequence: Synthetic polynucleotide
gcggcggcgccgccatgcccgccatgccctgcgcccgagttcttgggtgggccttcagtgttcctttttcccccgaaaccaaaagataccctgatgatttcgcgcacccctgaagttacttgtgtggttgttgacgtctcacaagaggacccagaggtacaattcaactggtatgtggacggagtagaggtgcataacgccaagactaagccccgtgaagagcagttcaattctacataccgtgtagtttcggttttaacggtcttacaccaagattggttgaacggaaaggaatataagtgcaaggtgtccaataagggactgccaagcagtatcgaaaaaacaatctcaaaagcaaagggacaaccgcgtgagccccaggtttacactctgccaccgtcgcaagaggagatgacgaagaatcaggtgtcgttaacctgtttggtcaaaggcttttatccaagcgatatcgcagtggaatgggaatcaaatgggcagcctgaaaataactataagacaaccccgcctgtacttgattctgatggatctttttttctttatagtcgcttaaccgtggataaatcccgttggcaggaaggtaatgtcttctcatgctcggttatgcacgaggcccttcataaccattacactcagaagagcctttctctgagtccggggaaa

SEQ ID NO: 1181 - DNA, 929 bp, Artificial Sequence
  Description of Artificial Sequence: Synthetic polynucleotide
atgactagtaaacaatcgaccatcgcattggcgctgcttcctctattgttcacaccggtgacaaaggcacaattgggtggtagccaggttaagttgcttcagtccggtgccgcattagtgaagcctggagcaagtgtcaagatgtcgtgtcaggcaagcgggtacagcttcaccgattattgggtgacgtgggttaaacaatcccacggacaatcattggaatggatcggggaaatctaccccagtaacactgtgacaaattttaacgacaattttaaagggaaggcaacccttacggtggataagtctacttccacagcgtatatggagctgagtcgcctgacttctgaggactctgccatctattactgtacacgtatcgggaacagtgggtatcgtgtagggtggttcatctactgggggcaaggtacccttgtgacagttttatccgggggtggcgggtcgggaggggggggatcaggcggtggagggtcggatacagttctgacccagtctccggcattggcggtgtcaccgggggagcgtgtcacgatcagttgtaaggcatcggaatccgtgtcgagccacatgcactggtaccagcagaaaccggggcagcagcctaaactgttgatttacaaggcatcaaatttagcctctggtgtacccgctcgttttagtggcagtggctcgggaacggacttcactttaacgattgaccctgttgaggcagacgataccgccacttacttctgccagcagggttggaacggcccattcacttttggggccgggacccgtctggaactgaagcgcgcggacgccgctggcagcggcgagctcggtggcagtggtaagcctatccctaaccctctcctcggcctcgattctacgggatccggtcatcaccaccatcaccatcaccattg

SEQ ID NO: 1182 - protein, 415 aa, Artificial Sequence
  Description of Artificial Sequence: Synthetic polypeptide
MTSKQSTIALALLPLLFTPVTKAVDYKDDDDKQLGGGKELKVTQPEKSVSVAAGDSTVLNCTLTSLLPVGPIKWYRGVGQSRLLIYSFTGEHFPRVTNVSDATKRNNMDFSIRISNVTPEDAGTYYCVKFQKGPSEPDTEIQSGGGTEVYVLAKPSPPEVSGPADRGIPDQKVNFTCKSHGFSPRNITLKWFKDGQELHHLETTVNPSGKNVSYNISSTVRVVLNSMDVHSKVICEVAHITLDRSPLRGIANLSNFIRVSPTVKVTQQSPTSMNQVNLTCRAERFYPEDLQLIWLENGNVSRNDTPKNLTKNTDGTYNYTSLFLVNSSAHREDVVFTCQVKHDQQPAITRNHTVLGLAHSSDQGSMQTFPGNNATHNWNKGELNSKEGKPIPNPLLGLDSTDPNSSSVDHHHHHH

SEQ ID NO: 1183 - protein, 187 aa, Artificial Sequence
  Description of Artificial Sequence: Synthetic polypeptide
MTSKQSTIALALLPLLFTPVTKAVDYKDDDDKQLGGSEEELQIIQPDKSVLVAAGETATLRCTITSLFPVGPIQWFRGAGPGRVLIYNQRQGPFPRVTTVSDTTKRNNMDFSIRIGNITPADAGTYYCIKFRKGSPDDVEFKSGAGTELSVRAKPSGSGELGGSGKPIPNPLLGLDSTGSGHHHHHH

SEQ ID NO: 1184 - protein, 119 aa, Artificial Sequence
  Description of Artificial Sequence: Synthetic polypeptide
EEELQIIQPDKSVLVAAGETATLRCTITSLFPVGPIQWFRGAGPGRVLIYNQRQGPFPRVTTVSDTTKRNNMDFSIRIGNITPADAGTYYCIKFRKGSPDDVEFKSGAGTELSVRAKPS

SEQ ID NO: 1185 - protein, 314 aa, Artificial Sequence
  Description of Artificial Sequence: Synthetic polypeptide
MTSKQSTIALALLPLLFTPVTKAVDYKDDDDKQLGGSEEEVQIIQPDKSVSVAAGESAILHCTITSLFPVGPIQWFRGAGPARVLIYNQRQGPFPRVTTISETTRRENMDFSISISNITPADAGTYYCIKFRKGSPDTEFKSGAGTELSVRAKPSGGGGSGGGGSEEEVQIIQPDKSVSVAAGESAILHCTITSLFPVGPIQWFRGAGPARVLIYNQRQGPFPRVTTISETTRRENMDFSISISNITPADAGTYYCIKFRKGSPDTEFKSGAGTELSVRAKPSGSGELGGSGKPIPNPLLGLDSTGSGHHHHHH

SEQ ID NO: 1186 - protein, 246 aa, Artificial Sequence
  Description of Artificial Sequence: Synthetic polypeptide
EEEVQIIQPDKSVSVAAGESAILHCTITSLFPVGPIQWFRGAGPARVLIYNQRQGPFPRVTTISETTRRENMDFSISISNITPADAGTYYCIKFRKGSPDTEFKSGAGTELSVRAKPSGGGGSGGGGSEEEVQIIQPDKSVSVAAGESAILHCTITSLFPVGPIQWFRGAGPARVLIYNQRQGPFPRVTTISETTRRENMDFSISISNITPADAGTYYCIKFRKGSPDTEFKSGAGTELSVRAKPS

SEQ ID NO: 1187 - protein, 416 aa, Artificial Sequence
  Description of Artificial Sequence: Synthetic polypeptide
MTSKQSTIALALLPLLFTPVTKAVDYKDDDDKQLGGSEEELQIIQPDKSVLVAAGETATLRCTITSLFPVGPIQWFRGAGPGRVLIYNQRQGPFPRVTTVSDTTKRNNMDFSIRIGNITPADAGTYYCIKFRKGSPDDVEFKSGAGTELSVRAKPSASAAAPPCPPCPAPEFLGGPSVFLFPPKPKDTLMISRTPEVTCVVVDVSQEDPEVQFNWYVDGVEVHNAKTKPREEQFNSTYRVVSVLTVLHQDWLNGKEYKCKVSNKGLPSSIEKTISKAKGQPREPQVYTLPPSQEEMTKNQVSLTCLVKGFYPSDIAVEWESNGQPENNYKTTPPVLDSDGSFFLYSRLTVDKSRWQEGNVFSCSVMHEALHNHYTQKSLSLSPGKGSGELGGSGKPIPNPLLGLDSTGSGHHHHHH

SEQ ID NO: 1188 - protein, 385 aa, Artificial Sequence
  Description of Artificial Sequence: Synthetic polypeptide
MTSKQSTIALALLPLLFTPVTKAVDYKDDDDKQLGGSEEELQIIQPDKSVLVAAGETATLRCTITSLFPVGPIQWFRGAGPGRVLIYNQRQGPFPRVTTVSDTTKRNNMDFSIRIGNITPADAGTYYCIKFRKGSPDDVEFKSGAGTELSVRAKPSASAAAPPCPPCPAPEFLGGPSVFLFPPKPKDTLMISRTPEVTCVVVDVSQEDPEVQFNWYVDGVEVHNAKTKPREEQFNSTYRVVSVLTVLHQDWLNGKEYKCKVSNKGLPSSIEKTISKAKGQPREPQVYTLPPSQEEMTKNQVSLTCLVKGFYPSDIAVEWESNGQPENNYKTTPPVLDSDGSFFLYSRLTVDKSRWQEGNVFSCSVMHEALHNHYTQKSLSLSPGK

SEQ ID NO: 1189 - protein, 348 aa, Artificial Sequence
  Description of Artificial Sequence: Synthetic polypeptide
EEELQIIQPDKSVLVAAGETATLRCTITSLFPVGPIQWFRGAGPGRVLIYNQRQGPFPRVTTVSDTTKRNNMDFSIRIGNITPADAGTYYCIKFRKGSPDDVEFKSGAGTELSVRAKPSASAAAPPCPPCPAPEFLGGPSVFLFPPKPKDTLMISRTPEVTCVVVDVSQEDPEVQFNWYVDGVEVHNAKTKPREEQFNSTYRVVSVLTVLHQDWLNGKEYKCKVSNKGLPSSIEKTISKAKGQPREPQVYTLPPSQEEMTKNQVSLTCLVKGFYPSDIAVEWESNGQPENNYKTTPPVLDSDGSFFLYSRLTVDKSRWQEGNVFSCSVMHEALHNHYTQKSLSLSPGK

SEQ ID NO: 1190 - protein, 407 aa, Artificial Sequence
  Description of Artificial Sequence: Synthetic polypeptide
MTSKQSTIALALLPLLFTPVTKAQLGGSEEEVQIIQPDKSVSVAAGESAILHCTITSLFPVGPIQWFRGAGPARVLIYNQRQGPFPRVTTISETTRRENMDFSISISNITPADAGTYYCIKFRKGSPDTEFKSGAGTELSVRAKPSASAAAPPCPPCPAPEFLGGPSVFLFPPKPKDTLMISRTPEVTCVVVDVSQEDPEVQFNWYVDGVEVHNAKTKPREEQFNSTYRVVSVLTVLHQDWLNGKEYKCKVSNKGLPSSIEKTISKAKGQPREPQVYTLPPSQEEMTKNQVSLTCLVKGFYPSDIAVEWESNGQPENNYKTTPPVLDSDGSFFLYSRLTVDKSRWQEGNVFSCSVMHEALHNHYTQKSLSLSPGKGSGELGGSGGKPIPNPLLGLDSTGSGHHHHHH

SEQ ID NO: 1191 - protein, 375 aa, Artificial Sequence
  Description of Artificial Sequence: Synthetic polypeptide
MTSKQSTIALALLPLLFTPVTKAQLGGSEEEVQIIQPDKSVSVAAGESAILHCTITSLFPVGPIQWFRGAGPARVLIYNQRQGPFPRVTTISETTRRENMDFSISISNITPADAGTYYCIKFRKGSPDTEFKSGAGTELSVRAKPSASAAAPPCPPCPAPEFLGGPSVFLFPPKPKDTLMISRTPEVTCVVVDVSQEDPEVQFNWYVDGVEVHNAKTKPREEQFNSTYRVVSVLTVLHQDWLNGKEYKCKVSNKGLPSSIEKTISKAKGQPREPQVYTLPPSQEEMTKNQVSLTCLVKGFYPSDIAVEWESNGQPENNYKTTPPVLDSDGSFFLYSRLTVDKSRWQEGNVFSCSVMHEALHNHYTQKSLSLSPGK

SEQ ID NO: 1192 - protein, 347 aa, Artificial Sequence
  Description of Artificial Sequence: Synthetic polypeptide
EEEVQIIQPDKSVSVAAGESAILHCTITSLFPVGPIQWFRGAGPARVLIYNQRQGPFPRVTTISETTRRENMDFSISISNITPADAGTYYCIKFRKGSPDTEFKSGAGTELSVRAKPSASAAAPPCPPCPAPEFLGGPSVFLFPPKPKDTLMISRTPEVTCVVVDVSQEDPEVQFNWYVDGVEVHNAKTKPREEQFNSTYRVVSVLTVLHQDWLNGKEYKCKVSNKGLPSSIEKTISKAKGQPREPQVYTLPPSQEEMTKNQVSLTCLVKGFYPSDIAVEWESNGQPENNYKTTPPVLDSDGSFFLYSRLTVDKSRWQEGNVFSCSVMHEALHNHYTQKSLSLSPGK

SEQ ID NO: 1193 - protein, 118 aa, Artificial Sequence
  Description of Artificial Sequence: Synthetic polypeptide
EEEVQIIQPDKSVSVAAGESAILHCTITSLFPVGPIQWFRGAGPARVLIYNQRQGPFPRVTTISETTRRENMDFSISISNITPADAGTYYCIKFRKGSPDTEFKSGAGTELSVRAKPS

SEQ ID NO: 1194 - protein, 227 aa, Artificial Sequence
  Description of Artificial Sequence: Synthetic polypeptide
AAAPPCPPCPAPEFLGGPSVFLFPPKPKDTLMISRTPEVTCVVVDVSQEDPEVQFNWYVDGVEVHNAKTKPREEQFNSTYRVVSVLTVLHQDWLNGKEYKCKVSNKGLPSSIEKTISKAKGQPREPQVYTLPPSQEEMTKNQVSLTCLVKGFYPSDIAVEWESNGQPENNYKTTPPVLDSDGSFFLYSRLTVDKSRWQEGNVFSCSVMHEALHNHYTQKSLSLSPGK

SEQ ID NO: 1195 - protein, 307 aa, Artificial Sequence
  Description of Artificial Sequence: Synthetic polypeptide
MTSKQSTIALALLPLLFTPVTKAQLGGSQVKLLQSGAALVKPGASVKMSCQASGYSFTDYWVTWVKQSHGQSLEWIGEIYPSNTVTNFNDNFKGKATLTVDKSTSTAYMELSRLTSEDSAIYYCTRIGNSGYRVGWFIYWGQGTLVTVLSGGGGSGGGGSGGGGSDTVLTQSPALAVSPGERVTISCKASESVSSHMHWYQQKPGQQPKLLIYKASNLASGVPARFSGSGSGTDFTLTIDPVEADDTATYFCQQGWNGPFTFGAGTRLELKRADAAGSGELGGSGKPIPNPLLGLDSTGSGHHHHHH

SEQ ID NO: 1196 - protein, 343 aa, Artificial Sequence
  Description of Artificial Sequence: Synthetic polypeptide
EEELQVIQPDKSVLVAAGETATLRCTATSLIPVGPIQWFRGAGPGRELIYNQKEGHFPRVTTVSDLTKRNNMDFSIRIGNITPADAGTYYCVKFRKGSPDDVEFKSGAGTELSVRAKPSAPVVSGPAARATPQHTVSFTCESHGFSPRDITLKWFKNGNELSDFQTNVDPVGESVSYSIHSTAKVVLTREDVHSQVICEVAHVTLQGDPLRGTANLSETIRVPPTLEVTQQPVRAENQVNVTCQVRKFYPQRLQLTWLENGNVSRTETASTVTENKDGTYNWMSWLLVNVSAHRDDVKLTCQVEHDGQPAVSKSHDLKVSAHPKEQGSNTAAENTGSNERNIY

SEQ ID NO: 1197 - protein, 21 aa, Artificial Sequence
  Description of Artificial Sequence: Synthetic peptide
IVVGVVCTLLVALLMAALYLV

SEQ ID NO: 1198 - protein, 110 aa, Artificial Sequence
  Description of Artificial Sequence: Synthetic polypeptide
RIRQKKAQGSTSSTRLHEPEKNAREITQDTNDITYADLNLPKGKKPAPQAAEPNNHTEYASIQTSPQPASEDTLTYADLDMVHLNRTPKQPAPKPEPSFSEYASVQVPRK

SEQ ID NO: 1199 - DNA, 1452 bp, Artificial Sequence
  Description of Artificial Sequence: Synthetic polynucleotide
atgactagtaaacaatcgaccatcgcattggcgctgcttcctctattgttcacaccggtgacaaaggcagtcgactataaggatgacgacgacaagcaattgggcggtggctttcgtgggccattgttacccaaccgtccattcaccactgtctggaacgccaatacacaatggtgtttggagcgtcatggagtcgatgtagatgtatccgtgtttgatgtcgtggcgaacccgggacagacatttcgtggaccggacatgaccatcttttattcgtcacaacttggcacctacccttattacactcccacgggtgagcctgtctttggtggacttcctcaaaatgcttctttgattgcgcacttggcgcgtactttccaagatatcctggctgccatccctgccccggatttttcgggactggctgtaattgattgggaggcatggcgccctcgttgggccttcaactgggatacaaaggacatttaccgccaacgcagccgcgccttggttcaggcccaacaccccgactggccggcgccccaggtggaagcagttgcacaggaccagttccaaggagccgctcgcgcttggatggcgggtactttacagttggggcgcgctttgcgtcctcgcggcttgtggggattctatggttttccagactgctataactacgacttcttgtctcccaactacaccggacagtgtccctctgggattcgtgctcagaatgaccaacttggatggctgtggggccaaagtcgtgcgctgtatccgagcatttatatgccagccgttctggaaggaacaggcaagtctcagatgtacgttcaacatcgtgtagcggaagcctttcgtgtagccgtggcggcaggtgacccaaatttgccggtcttaccttacgtacagattttttatgacactacaaatcacttccttccactggatgagttagaacattcattgggggagtcagcagctcagggcgcggctggggtggtgttgtgggtgagctgggaaaacacgcgtacgaaagagtcatgccaggctatcaaggaatacatggatacaactcttggtccgtttattttgaatgtgacttctggggcgcttttgtgttcccaggctctttgctcaggtcatgggcgttgcgttcgccgtacctcgcatccgaaagcgcttctgcttctgaacccagcgtcattcagcattcaactgacacctggagggggtcctttatcactgcgcggggctttatctttggaagaccaagctcagatggcggtcgagttcaagtgtcgctgctacccaggttggcaggccccgtggtgcgagcgtaaaagtatgtggaagggcgagctcaattcgaagcttgaaggtaagcctatccctaaccctctcctcggcctcgattctacgcgtaccggtcatcatcaccatcaccattga

SEQ ID NO: 1200 - DNA, 1353 bp, Artificial Sequence
  Description of Artificial Sequence: Synthetic polynucleotide
atgactagtaaacaatcgaccatcgcattggcgctgcttcctctattgttcacaccggtgacaaaggcagtcgactataaggatgacgacgacaagcaattgggcggtggctttcgtgggccattgttacccaaccgtccattcaccactgtctggaacgccaatacacaatggtgtttggagcgtcatggagtcgatgtagatgtatccgtgtttgatgtcgtggcgaacccgggacagacatttcgtggaccggacatgaccatcttttattcgtcacaacttggcacctacccttattacactcccacgggtgagcctgtctttggtggacttcctcaaaatgcttctttgattgcgcacttggcgcgtactttccaagatatcctggctgccatccctgccccggatttttcgggactggctgtaattgattgggaggcatggcgccctcgttgggccttcaactgggatacaaaggacatttaccgccaacgcagccgcgccttggttcaggcccaacaccccgactggccggcgccccaggtggaagcagttgcacaggaccagttccaaggagccgctcgcgcttggatggcgggtactttacagttggggcgcgctttgcgtcctcgcggcttgtggggattctatggttttccagactgctataactacgacttcttgtctcccaactacaccggacagtgtccctctgggattcgtgctcagaatgaccaacttggatggctgtggggccaaagtcgtgcgctgtatccgagcatttatatgccagccgttctggaaggaacaggcaagtctcagatgtacgttcaacatcgtgtagcggaagcctttcgtgtagccgtggcggcaggtgacccaaatttgccggtcttaccttacgtacagattttttatgacactacaaatcacttccttccactggatgagttagaacattcattgggggagtcagcagctcagggcgcggctggggtggtgttgtgggtgagctgggaaaacacgcgtacgaaagagtcatgccaggctatcaaggaatacatggatacaactcttggtccgtttattttgaatgtgacttctggggcgcttttgtgttcccaggctctttgctcaggtcatgggcgttgcgttcgccgtacctcgcatccgaaagcgcttctgcttctgaacccagcgtcattcagcattcaactgacacctggagggggtcctttatcactgcgcggggctttatctttggaagaccaagctcagatggcggtcgagttcaagtgtcgctgctacccaggttggcaggccccgtggtgcgagcgtaaaagtatgtgg

SEQ ID NO: 1201 - DNA, 1440 bp, Artificial Sequence
  Description of Artificial Sequence: Synthetic polynucleotide
atgactagtaaacaatcgaccatcgcattggcgctgcttcctctattgttcacaccggtgacaaaggcagtcgactataaggatgacgacgacaagcaattgggcggtggctctgttgttagcaaccgtccctttatcactgtgtggaacggtgacacacattggtgtttaaccgagtacggggtcgatgtggacgtttcggtctttgacgtcgtggctaataaagagcaatctttccaaggctctaatatgaccatcttctatcgtgaagagcttggcacatacccatactacaccccaactggcgagccagtctttggggggcttccgcaaaatgcctctttggtgactcatctggcgcataccttccaagatatcaaagcggcgatgcccgaaccagatttttccgggttagcggtaatcgactgggaggcatggcgtcctcgctgggcttttaactgggatagtaaagatatttatcgccaacgttctatggaacttgtgcaagcagaacatcctgattggcctgagaccctggtggaggcagctgctaaaaatcagttccaggaggcagcagaagcgtggatggccggaacgctgcagttggggcaagtgttgcgcccgcgcggactttggggctattatggattccccgactgttataacaatgacttcctttcgttaaattacaccggccaatgtcccgtgttcgttcgtgatcagaatgatcagttgggatggttgtggaaccagtcatacgccctttatccatccatctatttacccgccgctttaatgggcacggagaaatctcagatgtatgttcgccaccgtgttcaggaagcattgcgtgttgctattgtttcccgtgacccccacgttccggtcatgccatacgtccaaatcttttacgaaatgaccgactatttgttaccgttagaagagcttgaacacagtttgggggagtcagctgcacaaggtgtagcgggagcagtgctttggttgagttcagacaaaacgtctactaaagaatcatgtcaagcaattaaagcatacatggattccaccttgggtccgtttatcgtgaacgtcacatcggcggcattgttatgctcagaagccctttgctcggggcatggccgctgtgttcgtcatccaagctaccccgaggctctgttgacattgaatcctgcaagtttttcgatcgaactgacacatgacgggcgcccacccagtcttaaaggcaccctttcattgaaagatcgtgctcagatggcgatgaaattccgctgtcgttgctatcgtggttggcgcggcaagtggtgcgataaacgtggtatgaagggcgagctcaattcgaagcttgaaggtaagcctatccctaaccctctcctcggcctcgattctacgcgtaccggtcatcatcaccatcaccattga

SEQ ID NO: 1202 - DNA, 1580 bp, Artificial Sequence
  Description of Artificial Sequence: Synthetic polynucleotide
atgaaacaatcgaccatcgcattggcgctgcttcctctattgttcacaccggtgacaaaggcacaattgggcggtggcatgaaagagattgctgttaccatcgacgataaaaacgtgattgcttcagtcagtgaaagctttcacggcgtcgctttcgacgcttccctgttttctccgaaaggcctgtggagttttgttgacattacgtcacccaagctgtttaaactgcttgagggcctgtctccaggttactttcgcgttggcgggacattcgcgaactggttattcttcgacttagacgagaacaacaagtggaaggattactgggcttttaaagacaaaactcctgagacagccacaattacgcgccgttggttgtttcgcaagcaaaacaatttaaagaaggagacgttcgatgatcttgtcaagctgactaaaggatcaaagatgcgtcttttgtttgacctgaatgcagaagttcgcacagggtacgaaattggcaaaaagatgaccagcacttgggattcatctgaagctgaaaagctgttcaagtactgtgttagcaagggttacggagacaatattgactgggagcttggtaacgaacccgaccacacaagcgcacataacttaactgagaagcaggtgggtgaagatttcaaggcgctgcataaagttttggagaagtatccaaccttaaataaaggatcgttggtagggcctgacgtagggtggatgggggtatcatacgttaaaggtctggccgatggtgcaggtgaccatgtgacagcttttacgttacatcaatactacttcgatggtaacacgtcggatgtgtcaacttacttggacgctacctactttaaaaagttacaacagctgttcgataaggtaaaagacgtcttgaaaaattccccacataaagacaaacccctttggcttggcgaaactagctcgggttacaacagcggaacgaaagatgtgtctgaccgttatgtgtcagggttcttgacacttgataaattgggccttagcgccgctaacaacgtgaaggtcgtcattcgccagactatctataatggttactatggcttgttagacaaaaacacccttgagcctaacccggactattggttgatgcatgtacataactcgctggtagggaacactgtgttcaaggttgacgtgtctgatcctactaacaaggcccgtgtttacgcgcagtgtaccaaaactaatagcaaacatacacaatctcgctactacaaaggttcccttaccatttttgctttgaatgtcggcgacgaggatgtgaccttaaagattgaccaatattctgggaagaaaatttattcatatattctgactccagaggggggtcaactgaccagccaaaaagtacttttgaatggcaaggagttgaaactggtgagcgatcagcttccagagctgaacgcggatgagtccaaaacatcatttacattatctcctaagacgttcgggtttttcgtcgtgagtgacgctaatgtagaagcatgtaagaaaggatccggtcatcaccaccatcaccatcaccatta

SEQ ID NO: 1203 - DNA, 1545 bp, Artificial Sequence
  Description of Artificial Sequence: Synthetic polynucleotide
atgaaacaatcgaccatcgcattggcgctgcttcctctattgttcacaccggtgacaaaggcacaattgggcggtggcatgaaagagattgctgttaccatcgacgataaaaacgtgattgcttcagtcagtgaaagctttcacggcgtcgctttcgacgcttccctgttttctccgaaaggcctgtggagttttgttgacattacgtcacccaagctgtttaaactgcttgagggcctgtctccaggttactttcgcgttggcgggacattcgcgaactggttattcttcgacttagacgagaacaacaagtggaaggattactgggcttttaaagacaaaactcctgagacagccacaattacgcgccgttggttgtttcgcaagcaaaacaatttaaagaaggagacgttcgatgatcttgtcaagctgactaaaggatcaaagatgcgtcttttgtttgacctgaatgcagaagttcgcacagggtacgaaattggcaaaaagatgaccagcacttgggattcatctgaagctgaaaagctgttcaagtactgtgttagcaagggttacggagacaatattgactgggagcttggtaacgaacccgaccacacaagcgcacataacttaactgagaagcaggtgggtgaagatttcaaggcgctgcataaagttttggagaagtatccaaccttaaataaaggatcgttggtagggcctgacgtagggtggatgggggtatcatacgttaaaggtctggccgatggtgcaggtgaccatgtgacagcttttacgttacatcaatactacttcgatggtaacacgtcggatgtgtcaacttacttggacgctacctactttaaaaagttacaacagctgttcgataaggtaaaagacgtcttgaaaaattccccacataaagacaaacccctttggcttggcgaaactagctcgggttacaacagcggaacgaaagatgtgtctgaccgttatgtgtcagggttcttgacacttgataaattgggccttagcgccgctaacaacgtgaaggtcgtcattcgccagactatctataatggttactatggcttgttagacaaaaacacccttgagcctaacccggactattggttgatgcatgtacataactcgctggtagggaacactgtgttcaaggttgacgtgtctgatcctactaacaaggcccgtgtttacgcgcagtgtaccaaaactaatagcaaacatacacaatctcgctactacaaaggttcccttaccatttttgctttgaatgtcggcgacgaggatgtgaccttaaagattgaccaatattctgggaagaaaatttattcatatattctgactccagaggggggtcaactgaccagccaaaaagtacttttgaatggcaaggagttgaaactggtgagcgatcagcttccagagctgaacgcggatgagtccaaaacatcatttacattatctcctaagacgttcgggtttttcgtcgtgagtgacgctaatgtagaagcatgtaagaaa

SEQ ID NO: 1204 - protein, 483 aa, Artificial Sequence
  Description of Artificial Sequence: Synthetic polypeptide
MTSKQSTIALALLPLLFTPVTKAVDYKDDDDKQLGGGFRGPLLPNRPFTTVWNANTQWCLERHGVDVDVSVFDVVANPGQTFRGPDMTIFYSSQLGTYPYYTPTGEPVFGGLPQNASLIAHLARTFQDILAAIPAPDFSGLAVIDWEAWRPRWAFNWDTKDIYRQRSRALVQAQHPDWPAPQVEAVAQDQFQGAARAWMAGTLQLGRALRPRGLWGFYGFPDCYNYDFLSPNYTGQCPSGIRAQNDQLGWLWGQSRALYPSIYMPAVLEGTGKSQMYVQHRVAEAFRVAVAAGDPNLPVLPYVQIFYDTTNHFLPLDELEHSLGESAAQGAAGVVLWVSWENTRTKESCQAIKEYMDTTLGPFILNVTSGALLCSQALCSGHGRCVRRTSHPKALLLLNPASFSIQLTPGGGPLSLRGALSLEDQAQMAVEFKCRCYPGWQAPWCERKSMWKGELNSKLEGKPIPNPLLGLDSTRTGHHHHHH

SEQ ID NO: 1205 - protein, 414 aa, Homo sapiens
FRGPLLPNRPFTTVWNANTQWCLERHGVDVDVSVFDVVANPGQTFRGPDMTIFYSSQLGTYPYYTPTGEPVFGGLPQNASLIAHLARTFQDILAAIPAPDFSGLAVIDWEAWRPRWAFNWDTKDIYRQRSRALVQAQHPDWPAPQVEAVAQDQFQGAARAWMAGTLQLGRALRPRGLWGFYGFPDCYNYDFLSPNYTGQCPSGIRAQNDQLGWLWGQSRALYPSIYMPAVLEGTGKSQMYVQHRVAEAFRVAVAAGDPNLPVLPYVQIFYDTTNHFLPLDELEHSLGESAAQGAAGVVLWVSWENTRTKESCQAIKEYMDTTLGPFILNVTSGALLCSQALCSGHGRCVRRTSHPKALLLLNPASFSIQLTPGGGPLSLRGALSLEDQAQMAVEFKCRCYPGWQAPWCERKSMW

SEQ ID NO: 1206 - protein, 451 aa, Artificial Sequence
  Description of Artificial Sequence: Synthetic polypeptide
MTSKQSTIALALLPLLFTPVTKAVDYKDDDDKQLGGGFRGPLLPNRPFTTVWNANTQWCLERHGVDVDVSVFDVVANPGQTFRGPDMTIFYSSQLGTYPYYTPTGEPVFGGLPQNASLIAHLARTFQDILAAIPAPDFSGLAVIDWEAWRPRWAFNWDTKDIYRQRSRALVQAQHPDWPAPQVEAVAQDQFQGAARAWMAGTLQLGRALRPRGLWGFYGFPDCYNYDFLSPNYTGQCPSGIRAQNDQLGWLWGQSRALYPSIYMPAVLEGTGKSQMYVQHRVAEAFRVAVAAGDPNLPVLPYVQIFYDTTNHFLPLDELEHSLGESAAQGAAGVVLWVSWENTRTKESCQAIKEYMDTTLGPFILNVTSGALLCSQALCSGHGRCVRRTSHPKALLLLNPASFSIQLTPGGGPLSLRGALSLEDQAQMAVEFKCRCYPGWQAPWCERKSMW

SEQ ID NO: 1207 - protein, 499 aa, Artificial Sequence
  Description of Artificial Sequence: Synthetic polypeptide
MTSKQSTIALALLPLLFTPVTKAKQSTIALALLPLLFTPVTKAVDYKDDDDKDLGGGSVVSNRPFITVWNGDTHWCLTEYGVDVDVSVFDVVANKEQSFQGSNMTIFYREELGTYPYYTPTGEPVFGGLPQNASLVTHLAHTFQDIKAAMPEPDFSGLAVIDWEAWRPRWAFNWDSKDIYRQRSMELVQAEHPDWPETLVEAAAKNQFQEAAEAWMAGTLQLGQVLRPRGLWGYYGFPDCYNNDFLSLNYTGQCPVFVRDQNDQLGWLWNQSYALYPSIYLPAALMGTEKSQMYVRHRVQEALRVAIVSRDPHVPVMPYVQIFYEMTDYLLPLEELEHSLGESAAQGVAGAVLWLSSDKTSTKESCQAIKAYMDSTLGPFIVNVTSAALLCSEALCSGHGRCVRHPSYPEALLTLNPASFSIELTHDGRPPSLKGTLSLKDRAQMAMKFRCRCYRGWRGKWCDKRGMKGELNSKLEGKPIPNPLLGLDSTRTGHHHHHH

SEQ ID NO: 1208 - protein, 489 aa, Artificial Sequence
  Description of Artificial Sequence: Synthetic polypeptide
MKEIAVTIDDKNVIASVSESFHGVAFDASLFSPKGLWSFVDITSPKLFKLLEGLSPGYFRVGGTFANWLFFDLDENNKWKDYWAFKDKTPETATITRRWLFRKQNNLKKETFDDLVKLTKGSKMRLLFDLNAEVRTGYEIGKKMTSTWDSSEAEKLFKYCVSKGYGDNIDWELGNEPDHTSAHNLTEKQVGEDFKALHKVLEKYPTLNKGSLVGPDVGWMGVSYVKGLADGAGDHVTAFTLHQYYFDGNTSDVSTYLDATYFKKLQQLFDKVKDVLKNSPHKDKPLWLGETSSGYNSGTKDVSDRYVSGFLTLDKLGLSAANNVKVVIRQTIYNGYYGLLDKNTLEPNPDYWLMHVHNSLVGNTVFKVDVSDPTNKARVYAQCTKTNSKHTQSRYYKGSLTIFALNVGDEDVTLKIDQYSGKKIYSYILTPEGGQLTSQKVLLNGKELKLVSDQLPELNADESKTSFTLSPKTFGFFVVSDANVEACKK

SEQ ID NO: 1209 - protein, 78 aa, Homo sapiens
ITCPPPMSVEHADIWVKSYSLYSRERYICNSGFKRKAGTSSLTECVLNKATNVAHWTTPSLKCIRDPALVHQRPAPPS

SEQ ID NO: 1210 - protein, 248 aa, Artificial Sequence
  Description of Artificial Sequence: Synthetic polypeptide
MFKSTLAAMAAVFALSALSPAAMADYKDDDDKIEGRITCPPPMSVEHADIWVKSYSLYSRERYICNSGFKRKAGTSSLTECVLNKATNVAHWTTPSLKCIRDPALVHQRPAPPSSGGSGGGGSGGGSGGGGSLQNWVNVISDLKKIEDLIQSMHIDATLYTESDVHPSCKVTAMKCFLLELQVISLESGDASIHDTVENLIILANDSLSSNGNVTESGCKECEELEEKNIKEFLQSFVHIVQMFINTS

SEQ ID NO: 1211 - protein, 212 aa, Artificial Sequence
  Description of Artificial Sequence: Synthetic polypeptide
ITCPPPMSVEHADIWVKSYSLYSRERYICNSGFKRKAGTSSLTECVLNKATNVAHWTTPSLKCIRDPALVHQRPAPPSSGGSGGGGSGGGSGGGGSLQNWVNVISDLKKIEDLIQSMHIDATLYTESDVHPSCKVTAMKCFLLELQVISLESGDASIHDTVENLIILANDSLSSNGNVTESGCKECEELEEKNIKEFLQSFVHIVQMFINTS

SEQ ID NO: 1212 - protein, 114 aa, Homo sapiens
NWVNVISDLKKIEDLIQSMHIDATLYTESDVHPSCKVTAMKCFLLELQVISLESGDASIHDTVENLIILANDSLSSNGNVTESGCKECEELEEKNIKEFLQSFVHIVQMFINTS

SEQ ID NO: 1213 - protein, 20 aa, Artificial Sequence
  Description of Artificial Sequence: Synthetic peptide
SGGSGGGGSGGGSGGGGSLQ

SEQ ID NO: 1214 - DNA, 234 bp, Artificial Sequence
  Description of Artificial Sequence: Synthetic polynucleotide
atcacctgcccgcctccaatgtctgttgagcacgcagatatttgggtaaaatcttactctttatattcccgtgaacgctatatctgtaatagtggcttcaagcgcaaggcaggcacatcctcactgacggagtgtgttttaaacaaagcaacaaacgtcgctcactggacgacgcccagcctgaagtgcatccgcgacccggcattggtccatcaacgtccagcccctccctca

SEQ ID NO: 1215 - DNA, 747 bp, Artificial Sequence
  Description of Artificial Sequence: Synthetic polynucleotide
atgtttaagtctacacttgcagccatggccgcagtcttcgcactgtcagccttgagtcctgctgcaatggcagattataaagacgatgacgataagatcgaaggacgtatcacctgcccgcctccaatgtctgttgagcacgcagatatttgggtaaaatcttactctttatattcccgtgaacgctatatctgtaatagtggcttcaagcgcaaggcaggcacatcctcactgacggagtgtgttttaaacaaagcaacaaacgtcgctcactggacgacgcccagcctgaagtgcatccgcgacccggcattggtccatcaacgtccagcccctccctcatccggagggagcggcggcgggggtagtggaggcgggtcaggcggcgggggctcacttcagaactgggtgaatgtcatctcggacttaaagaagattgaagacttgattcagagcatgcatatcgacgcgactttatacaccgagtctgacgtacacccaagttgcaaggtcaccgccatgaagtgcttcttgcttgagttacaagtcatcagtttggaatctggagacgctagtattcacgatacggtggaaaacctgatcatccttgcaaatgactctctttcatccaatggtaatgttactgagtcggggtgcaaagaatgtgaagaacttgaggagaagaacattaaggaatttcttcagtcattcgtgcatatcgtacagatgttcatcaacacctcttaa

SEQ ID NO: 1216 - DNA, 639 bp, Artificial Sequence
  Description of Artificial Sequence: Synthetic polynucleotide
atcacctgcccgcctccaatgtctgttgagcacgcagatatttgggtaaaatcttactctttatattcccgtgaacgctatatctgtaatagtggcttcaagcgcaaggcaggcacatcctcactgacggagtgtgttttaaacaaagcaacaaacgtcgctcactggacgacgcccagcctgaagtgcatccgcgacccggcattggtccatcaacgtccagcccctccctcatccggagggagcggcggcgggggtagtggaggcgggtcaggcggcgggggctcacttcagaactgggtgaatgtcatctcggacttaaagaagattgaagacttgattcagagcatgcatatcgacgcgactttatacaccgagtctgacgtacacccaagttgcaaggtcaccgccatgaagtgcttcttgcttgagttacaagtcatcagtttggaatctggagacgctagtattcacgatacggtggaaaacctgatcatccttgcaaatgactctctttcatccaatggtaatgttactgagtcggggtgcaaagaatgtgaagaacttgaggagaagaacattaaggaatttcttcagtcattcgtgcatatcgtacagatgttcatcaacacctcttaa

SEQ ID NO: 1217 - DNA, 342 bp, Artificial Sequence
  Description of Artificial Sequence: Synthetic polynucleotide
aactgggtgaatgtcatctcggacttaaagaagattgaagacttgattcagagcatgcatatcgacgcgactttatacaccgagtctgacgtacacccaagttgcaaggtcaccgccatgaagtgcttcttgcttgagttacaagtcatcagtttggaatctggagacgctagtattcacgatacggtggaaaacctgatcatccttgcaaatgactctctttcatccaatggtaatgttactgagtcggggtgcaaagaatgtgaagaacttgaggagaagaacattaaggaatttcttcagtcattcgtgcatatcgtacagatgttcatcaacacctct

SEQ ID NO: 1218 - DNA, 60 bp, Artificial Sequence
  Description of Artificial Sequence: Synthetic oligonucleotide
tccggagggagcggcggcgggggtagtggaggcgggtcaggcggcgggggctcacttcag

SEQ ID NO: 1219 - DNA, 36 bp, Artificial Sequence
  Description of Artificial Sequence: Synthetic oligonucleotide
gattataaagacgatgacgataagatcgaaggacgt

SEQ ID NO: 1220 - DNA, 537 bp, Artificial Sequence
  Description of Artificial Sequence: Synthetic polynucleotide
atgaagaaaatttggctggcacttgccggtttggtattagcgttttccgcctcggcaagccccggacaaggcacccaatcagagaatagctgtacacatttccctggtaatcttcctaatatgctgcgtgacctgcgcgatgcgttcagtcgcgttaaaactttttttcaaatgaaagaccagttggataaccttttattaaaagaatcactgttagaggattttaaggggtatctgggatgccaggccctgtccgagatgattcaattttacctggaagaggtaatgccccaagctgagaaccaggacccggacatcaaggcgcacgttaactctttaggggagaatctgaaaaccttacgtctgcgtcttcgtcgctgccatcgcttccttccgtgcgaaaataaatcgaaagccgtggagcaagtcaaaaacgctttcaataagctgcaggagaagggaatttataaggctatgagtgagttcgatattttcattaactacattgaggcttatatgacaatgaagattcgcaat

SEQ ID NO: 1221 - DNA, 1044 bp, Artificial Sequence
  Description of Artificial Sequence: Synthetic polynucleotide
atgaagcaggcgcttcgcgttgcgtttgggttccttatcctgtgggcatccgtacttcacgccagccccggacaaggcacccaatcagagaatagctgtacacatttccctggtaatcttcctaatatgctgcgtgacctgcgcgatgcgttcagtcgcgttaaaactttttttcaaatgaaagaccagttggataaccttttattaaaagaatcactgttagaggattttaaggggtatctgggatgccaggccctgtccgagatgattcaattttacctggaagaggtaatgccccaagctgagaaccaggacccggacatcaaggcgcacgttaactctttaggggagaatctgaaaaccttacgtctgcgtcttcgtcgctgccatcgcttccttccgtgcgaaaataaatcgaaagccgtggagcaagtcaaaaacgctttcaataagctgcaggagaagggaatttataaggctatgagtgagttcgatattttcattaactacattgaggcttatatgacaatgaagattcgcaatggtggtggttcgggcggtgggtcaccaggtcagggtacgcaatccgaaaactcatgcactcatttcccaggtaacctgccgaacatgctgcgcgacctgcgcgatgcgttttcgcgtgtaaagactttcttccaaatgaaagatcaattagataacctgcttttaaaagagtcgctgcttgaagacttcaaaggctacttaggctgtcaagcccttagtgagatgatccaattttatcttgaggaagtcatgccgcaagcagaaaatcaggacccggatatcaaggcgcacgttaacagccttggtgagaatctgaaaacattacgcttgcgtttacgtcgctgccaccgttttctgccatgcgaaaacaagtcgaaagcagtcgagcaagtaaagaatgcctttaacaagctgcaggagaagggcatttataaagcgatgtcggagttcgatatctttatcaactacattgaagcatacatgacgatgaagatccgcaac

SEQ ID NO: 1222 - DNA, 1035 bp, Artificial Sequence
  Description of Artificial Sequence: Synthetic polynucleotide
atgcgcgtactgttattccttctgttgtctctttttatgttgcccgctttcagtagccccggacaaggcacccaatcagagaatagctgtacacatttccctggtaatcttcctaatatgctgcgtgacctgcgcgatgcgttcagtcgcgttaaaactttttttcaaatgaaagaccagttggataaccttttattaaaagaatcactgttagaggattttaaggggtatctgggatgccaggccctgtccgagatgattcaattttacctggaagaggtaatgccccaagctgagaaccaggacccggacatcaaggcgcacgttaactctttaggggagaatctgaaaaccttacgtctgcgtcttcgtcgctgccatcgcttccttccgtgcgaaaataaatcgaaagccgtggagcaagtcaaaaacgctttcaataagctgcaggagaagggaatttataaggctatgagtgagttcgatattttcattaactacattgaggcttatatgacaatgaagattcgcaatggtggtggttcgggcggtgggtcaccaggtcagggtacgcaatccgaaaactcatgcactcatttcccaggtaacctgccgaacatgctgcgcgacctgcgcgatgcgttttcgcgtgtaaagactttcttccaaatgaaagatcaattagataacctgcttttaaaagagtcgctgcttgaagacttcaaaggctacttaggctgtcaagcccttagtgagatgatccaattttatcttgaggaagtcatgccgcaagcagaaaatcaggacccggatatcaaggcgcacgttaacagccttggtgagaatctgaaaacattacgcttgcgtttacgtcgctgccaccgttttctgccatgcgaaaacaagtcgaaagcagtcgagcaagtaaagaatgcctttaacaagctgcaggagaagggcatttataaagcgatgtcggagttcgatatctttatcaactacattgaagcatacatgacgatgaagatccgcaac

SEQ ID NO: 1223 - DNA, 1044 bp, Artificial Sequence
  Description of Artificial Sequence: Synthetic polynucleotide
atgaagaagactgccatcgctattgccgtcgcccttgcgggtttcgcaaccgtggcgcaagcaagccccggacaaggcacccaatcagagaatagctgtacacatttccctggtaatcttcctaatatgctgcgtgacctgcgcgatgcgttcagtcgcgttaaaactttttttcaaatgaaagaccagttggataaccttttattaaaagaatcactgttagaggattttaaggggtatctgggatgccaggccctgtccgagatgattcaattttacctggaagaggtaatgccccaagctgagaaccaggacccggacatcaaggcgcacgttaactctttaggggagaatctgaaaaccttacgtctgcgtcttcgtcgctgccatcgcttccttccgtgcgaaaataaatcgaaagccgtggagcaagtcaaaaacgctttcaataagctgcaggagaagggaatttataaggctatgagtgagttcgatattttcattaactacattgaggcttatatgacaatgaagattcgcaatggtggtggttcgggcggtgggtcaccaggtcagggtacgcaatccgaaaactcatgcactcatttcccaggtaacctgccgaacatgctgcgcgacctgcgcgatgcgttttcgcgtgtaaagactttcttccaaatgaaagatcaattagataacctgcttttaaaagagtcgctgcttgaagacttcaaaggctacttaggctgtcaagcccttagtgagatgatccaattttatcttgaggaagtcatgccgcaagcagaaaatcaggacccggatatcaaggcgcacgttaacagccttggtgagaatctgaaaacattacgcttgcgtttacgtcgctgccaccgttttctgccatgcgaaaacaagtcgaaagcagtcgagcaagtaaagaatgcctttaacaagctgcaggagaagggcatttataaagcgatgtcggagttcgatatctttatcaactacattgaagcatacatgacgatgaagatccgcaac

SEQ ID NO: 1224 - DNA, 1047 bp, Artificial Sequence
  Description of Artificial Sequence: Synthetic polynucleotide
atgaaatatctgcttccaacggctgctgctggcctgttgcttcttgccgcccagcctgcgatggctagccccggacaaggcacccaatcagagaatagctgtacacatttccctggtaatcttcctaatatgctgcgtgacctgcgcgatgcgttcagtcgcgttaaaactttttttcaaatgaaagaccagttggataaccttttattaaaagaatcactgttagaggattttaaggggtatctgggatgccaggccctgtccgagatgattcaattttacctggaagaggtaatgccccaagctgagaaccaggacccggacatcaaggcgcacgttaactctttaggggagaatctgaaaaccttacgtctgcgtcttcgtcgctgccatcgcttccttccgtgcgaaaataaatcgaaagccgtggagcaagtcaaaaacgctttcaataagctgcaggagaagggaatttataaggctatgagtgagttcgatattttcattaactacattgaggcttatatgacaatgaagattcgcaatggtggtggttcgggcggtgggtcaccaggtcagggtacgcaatccgaaaactcatgcactcatttcccaggtaacctgccgaacatgctgcgcgacctgcgcgatgcgttttcgcgtgtaaagactttcttccaaatgaaagatcaattagataacctgcttttaaaagagtcgctgcttgaagacttcaaaggctacttaggctgtcaagcccttagtgagatgatccaattttatcttgaggaagtcatgccgcaagcagaaaatcaggacccggatatcaaggcgcacgttaacagccttggtgagaatctgaaaacattacgcttgcgtttacgtcgctgccaccgttttctgccatgcgaaaacaagtcgaaagcagtcgagcaagtaaagaatgcctttaacaagctgcaggagaagggcatttataaagcgatgtcggagttcgatatctttatcaactacattgaagcatacatgacgatgaagatccgcaac

SEQ ID NO: 1225 - DNA, 981 bp, Artificial Sequence; identical to SEQ ID NO: 492
  Description of Artificial Sequence: Synthetic polynucleotide

SEQ ID NO: 1226 - DNA, 480 bp, Homo sapiens
agccccggacaaggcacccaatcagagaatagctgtacacatttccctggtaatcttcctaatatgctgcgtgacctgcgcgatgcgttcagtcgcgttaaaactttttttcaaatgaaagaccagttggataaccttttattaaaagaatcactgttagaggattttaaggggtatctgggatgccaggccctgtccgagatgattcaattttacctggaagaggtaatgccccaagctgagaaccaggacccggacatcaaggcgcacgttaactctttaggggagaatctgaaaaccttacgtctgcgtcttcgtcgctgccatcgcttccttccgtgcgaaaataaatcgaaagccgtggagcaagtcaaaaacgctttcaataagctgcaggagaagggaatttataaggctatgagtgagttcgatattttcattaactacattgaggcttatatgacaatgaagattcgcaat

SEQ ID NO: 1227 - DNA, 22 bp, Artificial Sequence
  Description of Artificial Sequence: Synthetic oligonucleotide
tggtggtggttcgggcggtggg

SEQ ID NO: 1228 - DNA, 543 bp, Artificial Sequence
  Description of Artificial Sequence: Synthetic polynucleotide
atgaagcaggcgcttcgcgttgcgtttgggttccttatcctgtgggcatccgtacttcacgccagccccggacaaggcacccaatcagagaatagctgtacacatttccctggtaatcttcctaatatgctgcgtgacctgcgcgatgcgttcagtcgcgttaaaactttttttcaaatgaaagaccagttggataaccttttattaaaagaatcactgttagaggattttaaggggtatctgggatgccaggccctgtccgagatgattcaattttacctggaagaggtaatgccccaagctgagaaccaggacccggacatcaaggcgcacgttaactctttaggggagaatctgaaaaccttacgtctgcgtcttcgtcgctgccatcgcttccttccgtgcgaaaataaatcgaaagccgtggagcaagtcaaaaacgctttcaataagctgcaggagaagggaatttataaggctatgagtgagttcgatattttcattaactacattgaggcttatatgacaatgaagattcgcaat

SEQ ID NO: 1229 - DNA, 534 bp, Artificial Sequence
  Description of Artificial Sequence: Synthetic polynucleotide
atgcgcgtactgttattccttctgttgtctctttttatgttgcccgctttcagtagccccggacaaggcacccaatcagagaatagctgtacacatttccctggtaatcttcctaatatgctgcgtgacctgcgcgatgcgttcagtcgcgttaaaactttttttcaaatgaaagaccagttggataaccttttattaaaagaatcactgttagaggattttaaggggtatctgggatgccaggccctgtccgagatgattcaattttacctggaagaggtaatgccccaagctgagaaccaggacccggacatcaaggcgcacgttaactctttaggggagaatctgaaaaccttacgtctgcgtcttcgtcgctgccatcgcttccttccgtgcgaaaataaatcgaaagccgtggagcaagtcaaaaacgctttcaataagctgcaggagaagggaatttataaggctatgagtgagttcgatattttcattaactacattgaggcttatatgacaatgaagattcgcaat

SEQ ID NO: 1230 - protein, 346 aa, Artificial Sequence
  Description of Artificial Sequence: Synthetic polypeptide
MKKIWLALAGLVLAFSASASPGQGTQSENSCTHFPGNLPNMLRDLRDAFSRVKTFFQMKDQLDNLLLKESLLEDFKGYLGCQALSEMIQFYLEEVMPQAENQDPDIKAHVNSLGENLKTLRLRLRRCHRFLPCENKSKAVEQVKNAFNKLQEKGIYKAMSEFDIFINYIEAYMTMKIRNGGGSGGGSPGQGTQSENSCTHFPGNLPNMLRDLRDAFSRVKTFFQMKDQLDNLLLKESLLEDFKGYLGCQALSEMIQFYLEEVMPQAENQDPDIKAHVNSLGENLKTLRLRLRRCHRFLPCENKSKAVEQVKNAFNKLQEKGIYKAMSEFDIFINYIEAYMTMKIRN

SEQ ID NO: 1231 - protein, 348 aa, Artificial Sequence
  Description of Artificial Sequence: Synthetic polypeptide
MKQALRVAFGFLILWASVLHASPGQGTQSENSCTHFPGNLPNMLRDLRDAFSRVKTFFQMKDQLDNLLLKESLLEDFKGYLGCQALSEMIQFYLEEVMPQAENQDPDIKAHVNSLGENLKTLRLRLRRCHRFLPCENKSKAVEQVKNAFNKLQEKGIYKAMSEFDIFINYIEAYMTMKIRNGGGSGGGSPGQGTQSENSCTHFPGNLPNMLRDLRDAFSRVKTFFQMKDQLDNLLLKESLLEDFKGYLGCQALSEMIQFYLEEVMPQAENQDPDIKAHVNSLGENLKTLRLRLRRCHRFLPCENKSKAVEQVKNAFNKLQEKGIYKAMSEFDIFINYIEAYMTMKIRN

SEQ ID NO: 1232 - protein, 345 aa, Artificial Sequence
  Description of Artificial Sequence: Synthetic polypeptide
MRVLLFLLLSLFMLPAFSSPGQGTQSENSCTHFPGNLPNMLRDLRDAFSRVKTFFQMKDQLDNLLLKESLLEDFKGYLGCQALSEMIQFYLEEVMPQAENQDPDIKAHVNSLGENLKTLRLRLRRCHRFLPCENKSKAVEQVKNAFNKLQEKGIYKAMSEFDIFINYIEAYMTMKIRNGGGSGGGSPGQGTQSENSCTHFPGNLPNMLRDLRDAFSRVKTFFQMKDQLDNLLLKESLLEDFKGYLGCQALSEMIQFYLEEVMPQAENQDPDIKAHVNSLGENLKTLRLRLRRCHRFLPCENKSKAVEQVKNAFNKLQEKGIYKAMSEFDIFINYIEAYMTMKIRN

SEQ ID NO: 1233 - protein, 348 aa, Artificial Sequence
  Description of Artificial Sequence: Synthetic polypeptide
MKKTAIAIAVALAGFATVAQASPGQGTQSENSCTHFPGNLPNMLRDLRDAFSRVKTFFQMKDQLDNLLLKESLLEDFKGYLGCQALSEMIQFYLEEVMPQAENQDPDIKAHVNSLGENLKTLRLRLRRCHRFLPCENKSKAVEQVKNAFNKLQEKGIYKAMSEFDIFINYIEAYMTMKIRNGGGSGGGSPGQGTQSENSCTHFPGNLPNMLRDLRDAFSRVKTFFQMKDQLDNLLLKESLLEDFKGYLGCQALSEMIQFYLEEVMPQAENQDPDIKAHVNSLGENLKTLRLRLRRCHRFLPCENKSKAVEQVKNAFNKLQEKGIYKAMSEFDIFINYIEAYMTMKIRN

SEQ ID NO: 1234 - protein, 349 aa, Artificial Sequence
  Description of Artificial Sequence: Synthetic polypeptide
MKYLLPTAAAGLLLLAAQPAMASPGQGTQSENSCTHFPGNLPNMLRDLRDAFSRVKTFFQMKDQLDNLLLKESLLEDFKGYLGCQALSEMIQFYLEEVMPQAENQDPDIKAHVNSLGENLKTLRLRLRRCHRFLPCENKSKAVEQVKNAFNKLQEKGIYKAMSEFDIFINYIEAYMTMKIRNGGGSGGGSPGQGTQSENSCTHFPGNLPNMLRDLRDAFSRVKTFFQMKDQLDNLLLKESLLEDFKGYLGCQALSEMIQFYLEEVMPQAENQDPDIKAHVNSLGENLKTLRLRLRRCHRFLPCENKSKAVEQVKNAFNKLQEKGIYKAMSEFDIFINYIEAYMTMKIRN

SEQ ID NO: 1235 - protein, 160 aa, Artificial Sequence; identical to SEQ ID NO: 497
  Description of Artificial Sequence: Synthetic polypeptide

SEQ ID NO: 1236 - protein, 327 aa, Homo sapiens; identical to SEQ ID NO: 143

SEQ ID NO: 1237 - protein, 179 aa, Artificial Sequence
  Description of Artificial Sequence: Synthetic polypeptide
MKKIWLALAGLVLAFSASASPGQGTQSENSCTHFPGNLPNMLRDLRDAFSRVKTFFQMKDQLDNLLLKESLLEDFKGYLGCQALSEMIQFYLEEVMPQAENQDPDIKAHVNSLGENLKTLRLRLRRCHRFLPCENKSKAVEQVKNAFNKLQEKGIYKAMSEFDIFINYIEAYMTMKIRN

SEQ ID NO: 1238 - protein, 181 aa, Artificial Sequence
  Description of Artificial Sequence: Synthetic polypeptide
MKQALRVAFGFLILWASVLHASPGQGTQSENSCTHFPGNLPNMLRDLRDAFSRVKTFFQMKDQLDNLLLKESLLEDFKGYLGCQALSEMIQFYLEEVMPQAENQDPDIKAHVNSLGENLKTLRLRLRRCHRFLPCENKSKAVEQVKNAFNKLQEKGIYKAMSEFDIFINYIEAYMTMKIRN

SEQ ID NO: 1239 - protein, 178 aa, Artificial Sequence
  Description of Artificial Sequence: Synthetic polypeptide
MRVLLFLLLSLFMLPAFSSPGQGTQSENSCTHFPGNLPNMLRDLRDAFSRVKTFFQMKDQLDNLLLKESLLEDFKGYLGCQALSEMIQFYLEEVMPQAENQDPDIKAHVNSLGENLKTLRLRLRRCHRFLPCENKSKAVEQVKNAFNKLQEKGIYKAMSEFDIFINYIEAYMTMKIRN

SEQ ID NO: 1240 - protein, 33 aa, Artificial Sequence; identical to SEQ ID NO: 148
  Description of Artificial Sequence: Synthetic polypeptide

SEQ ID NO: 1241 - protein, 232 aa, Artificial Sequence
  Description of Artificial Sequence: Synthetic polypeptide
MGYKMNISSLRKAFIFMGAVAALSLVNAQSALAHADGSFSDEMNTILDNLAARDFINWLIQTKITDGGGGSGGGGSGGGGSGGGGSAPISSHCRLDKSNFQQPYITNRTFMLAKEASLADNNTDVRLIGEKLFHGVSMSERCYLMKQVLNFTLEEVLFPQSDRFQPYMQEVVPFLARLSNRLSTCHIEGDDLHIQRNVQKLKDTVKKLGESGEIKAIGELDLLFMSLRNACI

SEQ ID NO: 1242 - protein, 217 aa, Artificial Sequence
  Description of Artificial Sequence: Synthetic polypeptide
MRVLLFLLLSLFMLPAFSHADGSFSDEMNTILDNLAARDFINWLIQTKITDGGGGSGGGGSGGGGSGGGGSAPISSHCRLDKSNFQQPYITNRTFMLAKEASLADNNTDVRLIGEKLFHGVSMSERCYLMKQVLNFTLEEVLFPQSDRFQPYMQEVVPFLARLSNRLSTCHIEGDDLHIQRNVQKLKDTVKKLGESGEIKAIGELDLLFMSLRNACI

SEQ ID NO: 1243 - DNA, 596 bp, Artificial Sequence
  Description of Artificial Sequence: Synthetic polynucleotide
atgcggatggcagtttcagtgatgaaatgaacacgattttggataatttagcagccagggatttcataaactggttaattcaaactaaaataacggatggagggggtggttcgggcggcggtggcagtggaggcggtgggtctggcgggggtggatctgcacccatcagttctcactgccgtttagacaaaagtaatttccagcaaccatatattaccaatcgtacgttcatgctggctaaggaagcatcgcttgctgacaataacactgatgtacgcctgatcggcgaaaaattatttcacggcgtgtccatgtctgaacgctgttatcttatgaagcaggtgttaaattttacccttgaagaagtactgtttccgcaaagcgaccgtttccagccttacatgcaagaagtcgtgccgttcttggctcgtttgtcgaaccgcctgtcaacgtgccatattgaaggagatgacttgcacatccaacgcaacgtccaaaaattgaaagatacggtaaaaaaactgggtgaaagcggagaaattaaggctattggcgagctggatcttctgttcatgtcgttacgcaatgcctgcatt

SEQ ID NO: 1244 - DNA, 696 bp, Artificial Sequence
  Description of Artificial Sequence: Synthetic polynucleotide
atggggtacaaaatgaacattagctcgcttcgcaaagcattcatttttatgggggctgttgcagctttaagccttgtcaatgcccagtcagcgcttgcccatgcggatggcagtttcagtgatgaaatgaacacgattttggataatttagcagccagggatttcataaactggttaattcaaactaaaataacggatggagggggtggttcgggcggcggtggcagtggaggcggtgggtctggcgggggtggatctgcacccatcagttctcactgccgtttagacaaaagtaatttccagcaaccatatattaccaatcgtacgttcatgctggctaaggaagcatcgcttgctgacaataacactgatgtacgcctgatcggcgaaaaattatttcacggcgtgtccatgtctgaacgctgttatcttatgaagcaggtgttaaattttacccttgaagaagtactgtttccgcaaagcgaccgtttccagccttacatgcaagaagtcgtgccgttcttggctcgtttgtcgaaccgcctgtcaacgtgccatattgaaggagatgacttgcacatccaacgcaacgtccaaaaattgaaagatacggtaaaaaaactgggtgaaagcggagaaattaaggctattggcgagctggatcttctgttcatgtcgttacgcaatgcctgcatt

SEQ ID NO: 1245 - DNA, 650 bp, Artificial Sequence
  Description of Artificial Sequence: Synthetic polynucleotide
atgcgcgtactgttattccttctgttgtctctttttatgttgcccgctttcagtatgcggatggcagtttcagtgatgaaatgaacacgattttggataatttagcagccagggatttcataaactggttaattcaaactaaaataacggatggagggggtggttcgggcggcggtggcagtggaggcggtgggtctggcgggggtggatctgcacccatcagttctcactgccgtttagacaaaagtaatttccagcaaccatatattaccaatcgtacgttcatgctggctaaggaagcatcgcttgctgacaataacactgatgtacgcctgatcggcgaaaaattatttcacggcgtgtccatgtctgaacgctgttatcttatgaagcaggtgttaaattttacccttgaagaagtactgtttccgcaaagcgaccgtttccagccttacatgcaagaagtcgtgccgttcttggctcgtttgtcgaaccgcctgtcaacgtgccatattgaaggagatgacttgcacatccaacgcaacgtccaaaaattgaaagatacggtaaaaaaactgggtgaaagcggagaaattaaggctattggcgagctggatcttctgttcatgtcgttacgcaatgcctgcatt

SEQ ID NO: 1246 - protein, 380 aa, Artificial Sequence
  Description of Artificial Sequence: Synthetic polypeptide
HADGSFSDEMNTILDNLAARDFINWLIQTKITDGGGGSGGGGSGGGGSGGGGSSPGQGTQSENSCTHFPGNLPNMLRDLRDAFSRVKTFFQMKDQLDNLLLKESLLEDFKGYLGCQALSEMIQFYLEEVMPQAENQDPDIKAHVNSLGENLKTLRLRLRRCHRFLPCENKSKAVEQVKNAFNKLQEKGIYKAMSEFDIFINYIEAYMTMKIRNGGGSGGGSPGQGTQSENSCTHFPGNLPNMLRDLRDAFSRVKTFFQMKDQLDNLLLKESLLEDFKGYLGCQALSEMIQFYLEEVMPQAENQDPDIKAHVNSLGENLKTLRLRLRRCHRFLPCENKSKAVEQVKNAFNKLQEKGIYKAMSEFDIFINYIEAYMTMKIRN

SEQ ID NO: 1247 - protein, 413 aa, Artificial Sequence
  Description of Artificial Sequence: Synthetic polypeptide
MGYKMNISSLRKAFIFMGAVAALSLVNAQSALAHADGSFSDEMNTILDNLAARDFINWLIQTKITDGGGGSGGGGSGGGGSGGGGSSPGQGTQSENSCTHFPGNLPNMLRDLRDAFSRVKTFFQMKDQLDNLLLKESLLEDFKGYLGCQALSEMIQFYLEEVMPQAENQDPDIKAHVNSLGENLKTLRLRLRRCHRFLPCENKSKAVEQVKNAFNKLQEKGIYKAMSEFDIFINYIEAYMTMKIRNGGGSGGGSPGQGTQSENSCTHFPGNLPNMLRDLRDAFSRVKTFFQMKDQLDNLLLKESLLEDFKGYLGCQALSEMIQFYLEEVMPQAENQDPDIKAHVNSLGENLKTLRLRLRRCHRFLPCENKSKAVEQVKNAFNKLQEKGIYKAMSEFDIFINYIEAYMTMKIRN

SEQ ID NO: 1248 - protein, 398 aa, Artificial Sequence
  Description of Artificial Sequence: Synthetic polypeptide
MRVLLFLLLSLFMLPAFSHADGSFSDEMNTILDNLAARDFINWLIQTKITDGGGGSGGGGSGGGGSGGGGSSPGQGTQSENSCTHFPGNLPNMLRDLRDAFSRVKTFFQMKDQLDNLLLKESLLEDFKGYLGCQALSEMIQFYLEEVMPQAENQDPDIKAHVNSLGENLKTLRLRLRRCHRFLPCENKSKAVEQVKNAFNKLQEKGIYKAMSEFDIFINYIEAYMTMKIRNGGGSGGGSPGQGTQSENSCTHFPGNLPNMLRDLRDAFSRVKTFFQMKDQLDNLLLKESLLEDFKGYLGCQALSEMIQFYLEEVMPQAENQDPDIKAHVNSLGENLKTLRLRLRRCHRFLPCENKSKAVEQVKNAFNKLQEKGIYKAMSEFDIFINYIEAYMTMKIRN

SEQ ID NO: 1249 - DNA, 1140 bp, Artificial Sequence
  Description of Artificial Sequence: Synthetic polynucleotide
catgcggatggcagtttcagtgatgaaatgaacacgattttggataatttagcagccagggatttcataaactggttaattcaaactaaaataacggatggagggggtggttcgggcggcggtggcagtggaggcggtgggtctggcgggggtggatctagccccggacaaggcacccaatcagagaatagctgtacacatttccctggtaatcttcctaatatgctgcgtgacctgcgcgatgcgttcagtcgcgttaaaactttcttccaaatgaaagaccagttggataaccttttattaaaagaatcactgttagaggattttaaggggtatctgggatgccaggccctgtccgagatgattcaattttacctggaagaggtaatgccccaagctgagaaccaggacccggacatcaaggcgcacgttaactctttaggggagaatctgaaaaccttacgtctgcgtcttcgtcgctgccatcgcttccttccgtgcgaaaataaatcgaaagccgtggagcaagtcaaaaacgctttcaataagctgcaggagaagggaatttataaggctatgagtgagttcgatattttcattaactacattgaggcttatatgacaatgaagattcgcaatggtggtggttcgggcggtgggtcaccaggtcagggtacgcaatccgaaaactcatgcactcatttcccaggtaacctgccgaacatgctgcgcgacctgcgcgatgcgttttcgcgtgtaaagactttcttccaaatgaaagatcaattagataacctgcttttaaaagagtcgctgcttgaagacttcaaaggctacttaggctgtcaagcccttagtgagatgatccaattttatcttgaggaagtcatgccgcaagcagaaaatcaggacccggatatcaaggcgcacgttaacagccttggtgagaatctgaaaacattacgcttgcgtttacgtcgctgccaccgttttctgccatgcgaaaacaagtcgaaagcagtcgagcaagtaaagaatgcctttaacaagctgcaggagaagggcatttataaagcgatgtcggagttcgatatctttatcaactacattgaagcatacatgacgatgaagatccgcaac

SEQ ID NO: 1250 - DNA, 1239 bp, Artificial Sequence
  Description of Artificial Sequence: Synthetic polynucleotide
atggggtacaaaatgaacattagctcgcttcgcaaagcattcatttttatgggggctgttgcagctttaagccttgtcaatgcccagtcagcgcttgcccatgcggatggcagtttcagtgatgaaatgaacacgattttggataatttagcagccagggatttcataaactggttaattcaaactaaaataacggatggagggggtggttcgggcggcggtggcagtggaggcggtgggtctggcgggggtggatctagccccggacaaggcacccaatcagagaatagctgtacacatttccctggtaatcttcctaatatgctgcgtgacctgcgcgatgcgttcagtcgcgttaaaactttcttccaaatgaaagaccagttggataaccttttattaaaagaatcactgttagaggattttaaggggtatctgggatgccaggccctgtccgagatgattcaattttacctggaagaggtaatgccccaagctgagaaccaggacccggacatcaaggcgcacgttaactctttaggggagaatctgaaaaccttacgtctgcgtcttcgtcgctgccatcgcttccttccgtgcgaaaataaatcgaaagccgtggagcaagtcaaaaacgctttcaataagctgcaggagaagggaatttataaggctatgagtgagttcgatattttcattaactacattgaggcttatatgacaatgaagattcgcaatggtggtggttcgggcggtgggtcaccaggtcagggtacgcaatccgaaaactcatgcactcatttcccaggtaacctgccgaacatgctgcgcgacctgcgcgatgcgttttcgcgtgtaaagactttcttccaaatgaaagatcaattagataacctgcttttaaaagagtcgctgcttgaagacttcaaaggctacttaggctgtcaagcccttagtgagatgatccaattttatcttgaggaagtcatgccgcaagcagaaaatcaggacccggatatcaaggcgcacgttaacagccttggtgagaatctgaaaacattacgcttgcgtttacgtcgctgccaccgttttctgccatgcgaaaacaagtcgaaagcagtcgagcaagtaaagaatgcctttaacaagctgcaggagaagggcatttataaagcgatgtcggagttcgatatctttatcaactacattgaagcatacatgacgatgaagatccgcaac

SEQ ID NO: 1251 - DNA, 1194 bp, Artificial Sequence
  Description of Artificial Sequence: Synthetic polynucleotide
atgcgcgtactgttattccttctgttgtctctttttatgttgcccgctttcagtcatgcggatggcagtttcagtgatgaaatgaacacgattttggataatttagcagccagggatttcataaactggttaattcaaactaaaataacggatggagggggtggttcgggcggcggtggcagtggaggcggtgggtctggcgggggtggatctagccccggacaaggcacccaatcagagaatagctgtacacatttccctggtaatcttcctaatatgctgcgtgacctgcgcgatgcgttcagtcgcgttaaaactttcttccaaatgaaagaccagttggataaccttttattaaaagaatcactgttagaggattttaaggggtatctgggatgccaggccctgtccgagatgattcaattttacctggaagaggtaatgccccaagctgagaaccaggacccggacatcaaggcgcacgttaactctttaggggagaatctgaaaaccttacgtctgcgtcttcgtcgctgccatcgcttccttccgtgcgaaaataaatcgaaagccgtggagcaagtcaaaaacgctttcaataagctgcaggagaagggaatttataaggctatgagtgagttcgatattttcattaactacattgaggcttatatgacaatgaagattcgcaatggtggtggttcgggcggtgggtcaccaggtcagggtacgcaatccgaaaactcatgcactcatttcccaggtaacctgccgaacatgctgcgcgacctgcgcgatgcgttttcgcgtgtaaagactttcttccaaatgaaagatcaattagataacctgcttttaaaagagtcgctgcttgaagacttcaaaggctacttaggctgtcaagcccttagtgagatgatccaattttatcttgaggaagtcatgccgcaagcagaaaatcaggacccggatatcaaggcgcacgttaacagccttggtgagaatctgaaaacattacgcttgcgtttacgtcgctgccaccgttttctgccatgcgaaaacaagtcgaaagcagtcgagcaagtaaagaatgcctttaacaagctgcaggagaagggcatttataaagcgatgtcggagttcgatatctttatcaactacattgaagcatacatgacgatgaagatccgcaac

SEQ ID NO: 1252 - DNA, 1791 bp, Artificial Sequence
  Description of Artificial Sequence: Synthetic polynucleotide
atggggtacaaaatgaacattagctcgcttcgcaaagcattcatttttatgggggctgttgcagctttaagccttgtcaatgcccagtcagcgcttgccgtcgactataaggatgacgacgacaagcaattgggcggtggcatctgggagcttaagaaggacgtgtatgtagtggagttagactggtatccagatgcccccggagagatggtggtcttaacatgtgacactccagaggaggacgggattacctggacacttgaccagtcaagcgaggtattgggttctggaaagacgcttactattcaagtcaaagaatttggggatgccgggcagtatacatgtcacaagggcggcgaagttctgtcgcactccttacttttgttacacaaaaaagaagacggcatttggtccacagacatccttaaggaccaaaaggagccgaagaataagacgtttctgcgctgtgaagcgaagaactatagtggtcgctttacttgctggtggttgacgaccatttccactgatttaaccttttcggtaaagagttctcgcgggagttccgacccacagggcgtgacttgtggcgcagccacactttcggcggaacgcgttcgtggggacaataaggaatacgaatattcggtcgagtgtcaggaagattcagcttgccctgccgctgaggagtcacttccgattgaagtgatggttgacgccgtgcacaaattaaagtatgaaaattacacgtcatctttctttatccgtgacattattaagcccgacccgccaaagaatctgcagcttaaacccctgaagaacagccgccaggtggaagtaagctgggaatatcctgacacctggtccactccgcattcgtatttctcgttgacgttttgtgttcaggtgcagggaaagagcaagcgcgaaaagaaggatcgcgtctttacagacaaaacgtccgcgacggttatttgtcgtaagaatgctagtatctctgttcgcgctcaggaccgttattactcatctagttggtcggagtgggcctcggttccctgctctgggggtggaggatcgggtggaggtggctcgggaggtggcggctcccgtaatttaccggtggctactcctgacccagggatgttcccgtgcttgcaccatagccaaaacttacttcgcgctgtcagcaacatgcttcagaaagcacgtcaaacgcttgagttttacccgtgtactagcgaagagatcgatcacgaggacattaccaaagacaaaacctccaccgtcgaggcctgccttccacttgaactgacgaaaaatgagtcatgcttaaattctcgtgaaacctccttcattactaacggatcgtgcctggcctcgcgcaagacttcgttcatgatggcattatgcttgtcgtctatttatgaagaccttaaaatgtatcaagtggagttcaagacgatgaatgcaaaacttcttatggacccgaagcgtcaaatcttcttagaccaaaacatgttggccgtgatcgatgaactgatgcaagccttgaattttaattcggaaactgtaccgcaaaaatcttctcttgaagaaccggatttctataagaccaaaattaaactttgtattttacttcacgctttccgcatccgtgcagtaactatcgaccgcgtaatgagttaccttaacgcctcgggtggcgagctcggtggcagtggtaagcctatccctaaccctctcctcggcctcgattctacgggatccggtcatcaccaccatcaccatcaccat

SEQ ID NO: 1253 - DNA, 1749 bp, Artificial Sequence
  Description of Artificial Sequence: Synthetic polynucleotide
atgaaaaagatttggctggctcttgccggtttagtcctggcattcagcgcaagcgcggtcgactataaggatgacgacgacaagcaattgggcggtggcatctgggagcttaagaaggacgtgtatgtagtggagttagactggtatccagatgcccccggagagatggtggtcttaacatgtgacactccagaggaggacgggattacctggacacttgaccagtcaagcgaggtattgggttctggaaagacgcttactattcaagtcaaagaatttggggatgccgggcagtatacatgtcacaagggcggcgaagttctgtcgcactccttacttttgttacacaaaaaagaagacggcatttggtccacagacatccttaaggaccaaaaggagccgaagaataagacgtttctgcgctgtgaagcgaagaactatagtggtcgctttacttgctggtggttgacgaccatttccactgatttaaccttttcggtaaagagttctcgcgggagttccgacccacagggcgtgacttgtggcgcagccacactttcggcggaacgcgttcgtggggacaataaggaatacgaatattcggtcgagtgtcaggaagattcagcttgccctgccgctgaggagtcacttccgattgaagtgatggttgacgccgtgcacaaattaaagtatgaaaattacacgtcatctttctttatccgtgacattattaagcccgacccgccaaagaatctgcagcttaaacccctgaagaacagccgccaggtggaagtaagctgggaatatcctgacacctggtccactccgcattcgtatttctcgttgacgttttgtgttcaggtgcagggaaagagcaagcgcgaaaagaaggatcgcgtctttacagacaaaacgtccgcgacggttatttgtcgtaagaatgctagtatctctgttcgcgctcaggaccgttattactcatctagttggtcggagtgggcctcggttccctgctctgggggtggaggatcgggtggaggtggctcgggaggtggcggctcccgtaatttaccggtggctactcctgacccagggatgttcccgtgcttgcaccatagccaaaacttacttcgcgctgtcagcaacatgcttcagaaagcacgtcaaacgcttgagttttacccgtgtactagcgaagagatcgatcacgaggacattaccaaagacaaaacctccaccgtcgaggcctgccttccacttgaactgacgaaaaatgagtcatgcttaaattctcgtgaaacctccttcattactaacggatcgtgcctggcctcgcgcaagacttcgttcatgatggcattatgcttgtcgtctatttatgaagaccttaaaatgtatcaagtggagttcaagacgatgaatgcaaaacttcttatggacccgaagcgtcaaatcttcttagaccaaaacatgttggccgtgatcgatgaactgatgcaagccttgaattttaattcggaaactgtaccgcaaaaatcttctcttgaagaaccggatttctataagaccaaaattaaactttgtattttacttcacgctttccgcatccgtgcagtaactatcgaccgcgtaatgagttaccttaacgcctcgggtggcgagctcggtggcagtggtaagcctatccctaaccctctcctcggcctcgattctacgggatccggtcatcaccaccatcaccatcaccat

SEQ ID NO: 1254 - DNA, 1755 bp, Artificial Sequence
  Description of Artificial Sequence: Synthetic polynucleotide
atgaaacagagcacaatcgctttagccttgctgcctcttcttttcacgcctgtcacgaaggcagtcgactataaggatgacgacgacaagcaattgggcggtggcatctgggagcttaagaaggacgtgtatgtagtggagttagactggtatccagatgcccccggagagatggtggtcttaacatgtgacactccagaggaggacgggattacctggacacttgaccagtcaagcgaggtattgggttctggaaagacgcttactattcaagtcaaagaatttggggatgccgggcagtatacatgtcacaagggcggcgaagttctgtcgcactccttacttttgttacacaaaaaagaagacggcatttggtccacagacatccttaaggaccaaaaggagccgaagaataagacgtttctgcgctgtgaagcgaagaactatagtggtcgctttacttgctggtggttgacgaccatttccactgatttaaccttttcggtaaagagttctcgcgggagttccgacccacagggcgtgacttgtggcgcagccacactttcggcggaacgcgttcgtggggacaataaggaatacgaatattcggtcgagtgtcaggaagattcagcttgccctgccgctgaggagtcacttccgattgaagtgatggttgacgccgtgcacaaattaaagtatgaaaattacacgtcatctttctttatccgtgacattattaagcccgacccgccaaagaatctgcagcttaaacccctgaagaacagccgccaggtggaagtaagctgggaatatcctgacacctggtccactccgcattcgtatttctcgttgacgttttgtgttcaggtgcagggaaagagcaagcgcgaaaagaaggatcgcgtctttacagacaaaacgtccgcgacggttatttgtcgtaagaatgctagtatctctgttcgcgctcaggaccgttattactcatctagttggtcggagtgggcctcggttccctgctctgggggtggaggatcgggtggaggtggctcgggaggtggcggctcccgtaatttaccggtggctactcctgacccagggatgttcccgtgcttgcaccatagccaaaacttacttcgcgctgtcagcaacatgcttcagaaagcacgtcaaacgcttgagttttacccgtgtactagcgaagagatcgatcacgaggacattaccaaagacaaaacctccaccgtcgaggcctgccttccacttgaactgacgaaaaatgagtcatgcttaaattctcgtgaaacctccttcattactaacggatcgtgcctggcctcgcgcaagacttcgttcatgatggcattatgcttgtcgtctatttatgaagaccttaaaatgtatcaagtggagttcaagacgatgaatgcaaaacttcttatggacccgaagcgtcaaatcttcttagaccaaaacatgttggccgtgatcgatgaactgatgcaagccttgaattttaattcggaaactgtaccgcaaaaatcttctcttgaagaaccggatttctataagaccaaaattaaactttgtattttacttcacgctttccgcatccgtgcagtaactatcgaccgcgtaatgagttaccttaacgcctcgggtggcgagctcggtggcagtggtaagcctatccctaaccctctcctcggcctcgattctacgggatccggtcatcaccaccatcaccatcaccat

SEQ ID NO: 1255 - DNA, 1755 bp, Artificial Sequence
  Description of Artificial Sequence: Synthetic polynucleotide
atgaagcaggctctgcgcgtggcatttgggttcctgatcttatgggcgtccgtcttacacgcagtcgactataaggatgacgacgacaagcaattgggcggtggcatctgggagcttaagaaggacgtgtatgtagtggagttagactggtatccagatgcccccggagagatggtggtcttaacatgtgacactccagaggaggacgggattacctggacacttgaccagtcaagcgaggtattgggttctggaaagacgcttactattcaagtcaaagaatttggggatgccgggcagtatacatgtcacaagggcggcgaagttctgtcgcactccttacttttgttacacaaaaaagaagacggcatttggtccacagacatccttaaggaccaaaaggagccgaagaataagacgtttctgcgctgtgaagcgaagaactatagtggtcgctttacttgctggtggttgacgaccatttccactgatttaaccttttcggtaaagagttctcgcgggagttccgacccacagggcgtgacttgtggcgcagccacactttcggcggaacgcgttcgtggggacaataaggaatacgaatattcggtcgagtgtcaggaagattcagcttgccctgccgctgaggagtcacttccgattgaagtgatggttgacgccgtgcacaaattaaagtatgaaaattacacgtcatctttctttatccgtgacattattaagcccgacccgccaaagaatctgcagcttaaacccctgaagaacagccgccaggtggaagtaagctgggaatatcctgacacctggtccactccgcattcgtatttctcgttgacgttttgtgttcaggtgcagggaaagagcaagcgcgaaaagaaggatcgcgtctttacagacaaaacgtccgcgacggttatttgtcgtaagaatgctagtatctctgttcgcgctcaggaccgttattactcatctagttggtcggagtgggcctcggttccctgctctgggggtggaggatcgggtggaggtggctcgggaggtggcggctcccgtaatttaccggtggctactcctgacccagggatgttcccgtgcttgcaccatagccaaaacttacttcgcgctgtcagcaacatgcttcagaaagcacgtcaaacgcttgagttttacccgtgtactagcgaagagatcgatcacgaggacattaccaaagacaaaacctccaccgtcgaggcctgccttccacttgaactgacgaaaaatgagtcatgcttaaattctcgtgaaacctccttcattactaacggatcgtgcctggcctcgcgcaagacttcgttcatgatggcattatgcttgtcgtctatttatgaagaccttaaaatgtatcaagtggagttcaagacgatgaatgcaaaacttcttatggacccgaagcgtcaaatcttcttagaccaaaacatgttggccgtgatcgatgaactgatgcaagccttgaattttaattcggaaactgtaccgcaaaaatcttctcttgaagaaccggatttctataagaccaaaattaaactttgtattttacttcacgctttccgcatccgtgcagtaactatcgaccgcgtaatgagttaccttaacgcctcgggtggcgagctcggtggcagtggtaagcctatccctaaccctctcctcggcctcgattctacgggatccggtcatcaccaccatcaccatcaccat

SEQ ID NO: 1256 - DNA, 1770 bp, Artificial Sequence
  Description of Artificial Sequence: Synthetic polynucleotide
atgaaaatcaagacgggggcacgcattcttgccttgagcgccttgacaacgatgatgttcagtgcaagtgcattagcggtcgactataaggatgacgacgacaagcaattgggcggtggcatctgggagcttaagaaggacgtgtatgtagtggagttagactggtatccagatgcccccggagagatggtggtcttaacatgtgacactccagaggaggacgggattacctggacacttgaccagtcaagcgaggtattgggttctggaaagacgcttactattcaagtcaaagaatttggggatgccgggcagtatacatgtcacaagggcggcgaagttctgtcgcactccttacttttgttacacaaaaaagaagacggcatttggtccacagacatccttaaggaccaaaaggagccgaagaataagacgtttctgcgctgtgaagcgaagaactatagtggtcgctttacttgctggtggttgacgaccatttccactgatttaaccttttcggtaaagagttctcgcgggagttccgacccacagggcgtgacttgtggcgcagccacactttcggcggaacgcgttcgtggggacaataaggaatacgaatattcggtcgagtgtcaggaagattcagcttgccctgccgctgaggagtcacttccgattgaagtgatggttgacgccgtgcacaaattaaagtatgaaaattacacgtcatctttctttatccgtgacattattaagcccgacccgccaaagaatctgcagcttaaacccctgaagaacagccgccaggtggaagtaagctgggaatatcctgacacctggtccactccgcattcgtatttctcgttgacgttttgtgttcaggtgcagggaaagagcaagcgcgaaaagaaggatcgcgtctttacagacaaaacgtccgcgacggttatttgtcgtaagaatgctagtatctctgttcgcgctcaggaccgttattactcatctagttggtcggagtgggcctcggttccctgctctgggggtggaggatcgggtggaggtggctcgggaggtggcggctcccgtaatttaccggtggctactcctgacccagggatgttcccgtgcttgcaccatagccaaaacttacttcgcgctgtcagcaacatgcttcagaaagcacgtcaaacgcttgagttttacccgtgtactagcgaagagatcgatcacgaggacattaccaaagacaaaacctccaccgtcgaggcctgccttccacttgaactgacgaaaaatgagtcatgcttaaattctcgtgaaacctccttcattactaacggatcgtgcctggcctcgcgcaagacttcgttcatgatggcattatgcttgtcgtctatttatgaagaccttaaaatgtatcaagtggagttcaagacgatgaatgcaaaacttcttatggacccgaagcgtcaaatcttcttagaccaaaacatgttggccgtgatcgatgaactgatgcaagccttgaattttaattcggaaactgtaccgcaaaaatcttctcttgaagaaccggatttctataagaccaaaattaaactttgtattttacttcacgctttccgcatccgtgcagtaactatcgaccgcgtaatgagttaccttaacgcctcgggtggcgagctcggtggcagtggtaagcctatccctaaccctctcctcggcctcgattctacgggatccggtcatcaccaccatcaccatcaccat

SEQ ID NO: 1257 - DNA, 1761 bp, Artificial Sequence
  Description of Artificial Sequence: Synthetic polynucleotide
atgaataagaaagtcttgacattgtcggcggtcatggcctcgatgttgttcggggcagcagcccacgcagtcgactataaggatgacgacgacaagcaattgggcggtggcatctgggagcttaagaaggacgtgtatgtagtggagttagactggtatccagatgcccccggagagatggtggtcttaacatgtgacactccagaggaggacgggattacctggacacttgaccagtcaagcgaggtattgggttctggaaagacgcttactattcaagtcaaagaatttggggatgccgggcagtatacatgtcacaagggcggcgaagttctgtcgcactccttacttttgttacacaaaaaagaagacggcatttggtccacagacatccttaaggaccaaaaggagccgaagaataagacgtttctgcgctgtgaagcgaagaactatagtggtcgctttacttgctggtggttgacgaccatttccactgatttaaccttttcggtaaagagttctcgcgggagttccgacccacagggcgtgacttgtggcgcagccacactttcggcggaacgcgttcgtggggacaataaggaatacgaatattcggtcgagtgtcaggaagattcagcttgccctgccgctgaggagtcacttccgattgaagtgatggttgacgccgtgcacaaattaaagtatgaaaattacacgtcatctttctttatccgtgacattattaagcccgacccgccaaagaatctgcagcttaaacccctgaagaacagccgccaggtggaagtaagctgggaatatcctgacacctggtccactccgcattcgtatttctcgttgacgttttgtgttcaggtgcagggaaagagcaagcgcgaaaagaaggatcgcgtctttacagacaaaacgtccgcgacggttatttgtcgtaagaatgctagtatctctgttcgcgctcaggaccgttattactcatctagttggtcggagtgggcctcggttccctgctctgggggtggaggatcgggtggaggtggctcgggaggtggcggctcccgtaatttaccggtggctactcctgacccagggatgttcccgtgcttgcaccatagccaaaacttacttcgcgctgtcagcaacatgcttcagaaagcacgtcaaacgcttgagttttacccgtgtactagcgaagagatcgatcacgaggacattaccaaagacaaaacctccaccgtcgaggcctgccttccacttgaactgacgaaaaatgagtcatgcttaaattctcgtgaaacctccttcattactaacggatcgtgcctggcctcgcgcaagacttcgttcatgatggcattatgcttgtcgtctatttatgaagaccttaaaatgtatcaagtggagttcaagacgatgaatgcaaaacttcttatggacccgaagcgtcaaatcttcttagaccaaaacatgttggccgtgatcgatgaactgatgcaagccttgaattttaattcggaaactgtaccgcaaaaatcttctcttgaagaaccggatttctataagaccaaaattaaactttgtattttacttcacgctttccgcatccgtgcagtaactatcgaccgcgtaatgagttaccttaacgcctcgggtggcgagctcggtggcagtggtaagcctatccctaaccctctcctcggcctcgattctacgggatccggtcatcaccaccatcaccatcaccat

SEQ ID NO: 1258 - DNA, 1758 bp, Artificial Sequence
  Description of Artificial Sequence: Synthetic polynucleotide
atgatgaagcgtaacatcttagccgttattgtccccgcattgcttgtggccgggacggctaacgcagtcgactataaggatgacgacgacaagcaattgggcggtggcatctgggagcttaagaaggacgtgtatgtagtggagttagactggtatccagatgcccccggagagatggtggtcttaacatgtgacactccagaggaggacgggattacctggacacttgaccagtcaagcgaggtattgggttctggaaagacgcttactattcaagtcaaagaatttggggatgccgggcagtatacatgtcacaagggcggcgaagttctgtcgcactccttacttttgttacacaaaaaagaagacggcatttggtccacagacatccttaaggaccaaaaggagccgaagaataagacgtttctgcgctgtgaagcgaagaactatagtggtcgctttacttgctggtggttgacgaccatttccactgatttaaccttttcggtaaagagttctcgcgggagttccgacccacagggcgtgacttgtggcgcagccacactttcggcggaacgcgttcgtggggacaataaggaatacgaatattcggtcgagtgtcaggaagattcagcttgccctgccgctgaggagtcacttccgattgaagtgatggttgacgccgtgcacaaattaaagtatgaaaattacacgtcatctttctttatccgtgacattattaagcccgacccgccaaagaatctgcagcttaaacccctgaagaacagccgccaggtggaagtaagctgggaatatcctgacacctggtccactccgcattcgtatttctcgttgacgttttgtgttcaggtgcagggaaagagcaagcgcgaaaagaaggatcgcgtctttacagacaaaacgtccgcgacggttatttgtcgtaagaatgctagtatctctgttcgcgctcaggaccgttattactcatctagttggtcggagtgggcctcggttccctgctctgggggtggaggatcgggtggaggtggctcgggaggtggcggctcccgtaatttaccggtggctactcctgacccagggatgttcccgtgcttgcaccatagccaaaacttacttcgcgctgtcagcaacatgcttcagaaagcacgtcaaacgcttgagttttacccgtgtactagcgaagagatcgatcacgaggacattaccaaagacaaaacctccaccgtcgaggcctgccttccacttgaactgacgaaaaatgagtcatgcttaaattctcgtgaaacctccttcattactaacggatcgtgcctggcctcgcgcaagacttcgttcatgatggcattatgcttgtcgtctatttatgaagaccttaaaatgtatcaagtggagttcaagacgatgaatgcaaaacttcttatggacccgaagcgtcaaatcttcttagaccaaaacatgttggccgtgatcgatgaactgatgcaagccttgaattttaattcggaaactgtaccgcaaaaatcttctcttgaagaaccggatttctataagaccaaaattaaactttgtattttacttcacgctttccgcatccgtgcagtaactatcgaccgcgtaatgagttaccttaacgcctcgggtggcgagctcggtggcagtggtaagcctatccctaaccctctcctcggcctcgattctacgggatccggtcatcaccaccatcaccatcaccat

SEQ ID NO: 1259 - DNA, 1755 bp, Artificial Sequence
  Description of Artificial Sequence: Synthetic polynucleotide
atgaagaagactgccatcgctattgccgtcgcccttgcgggtttcgcaaccgtggcgcaagcagtcgactataaggatgacgacgacaagcaattgggcggtggcatctgggagcttaagaaggacgtgtatgtagtggagttagactggtatccagatgcccccggagagatggtggtcttaacatgtgacactccagaggaggacgggattacctggacacttgaccagtcaagcgaggtattgggttctggaaagacgcttactattcaagtcaaagaatttggggatgccgggcagtatacatgtcacaagggcggcgaagttctgtcgcactccttacttttgttacacaaaaaagaagacggcatttggtccacagacatccttaaggaccaaaaggagccgaagaataagacgtttctgcgctgtgaagcgaagaactatagtggtcgctttacttgctggtggttgacgaccatttccactgatttaaccttttcggtaaagagttctcgcgggagttccgacccacagggcgtgacttgtggcgcagccacactttcggcggaacgcgttcgtggggacaataaggaatacgaatattcggtcgagtgtcaggaagattcagcttgccctgccgctgaggagtcacttccgattgaagtgatggttgacgccgtgcacaaattaaagtatgaaaattacacgtcatctttctttatccgtgacattattaagcccgacccgccaaagaatctgcagcttaaacccctgaagaacagccgccaggtggaagtaagctgggaatatcctgacacctggtccactccgcattcgtatttctcgttgacgttttgtgttcaggtgcagggaaagagcaagcgcgaaaagaaggatcgcgtctttacagacaaaacgtccgcgacggttatttgtcgtaagaatgctagtatctctgttcgcgctcaggaccgttattactcatctagttggtcggagtgggcctcggttccctgctctgggggtggaggatcgggtggaggtggctcgggaggtggcggctcccgtaatttaccggtggctactcctgacccagggatgttcccgtgcttgcaccatagccaaaacttacttcgcgctgtcagcaacatgcttcagaaagcacgtcaaacgcttgagttttacccgtgtactagcgaagagatcgatcacgaggacattaccaaagacaaaacctccaccgtcgaggcctgccttccacttgaactgacgaaaaatgagtcatgcttaaattctcgtgaaacctccttcattactaacggatcgtgcctggcctcgcgcaagacttcgttcatgatggcattatgcttgtcgtctatttatgaagaccttaaaatgtatcaagtggagttcaagacgatgaatgcaaaacttcttatggacccgaagcgtcaaatcttcttagaccaaaacatgttggccgtgatcgatgaactgatgcaagccttgaattttaattcggaaactgtaccgcaaaaatcttctcttgaagaaccggatttctataagaccaaaattaaactttgtattttacttcacgctttccgcatccgtgcagtaactatcgaccgcgtaatgagttaccttaacgcctcgggtggcgagctcggtggcagtggtaagcctatccctaaccctctcctcggcctcgattctacgggatccggtcatcaccaccatcaccatcaccat

SEQ ID NO: 1260 - DNA, 1746 bp, Artificial Sequence
  Description of Artificial Sequence: Synthetic polynucleotide
atgcgcgtgttattgttcttgctgctgagcttgtttatgttaccagctttcagtgtcgactataaggatgacgacgacaagcaattgggcggtggcatctgggagcttaagaaggacgtgtatgtagtggagttagactggtatccagatgcccccggagagatggtggtcttaacatgtgacactccagaggaggacgggattacctggacacttgaccagtcaagcgaggtattgggttctggaaagacgcttactattcaagtcaaagaatttggggatgccgggcagtatacatgtcacaagggcggcgaagttctgtcgcactccttacttttgttacacaaaaaagaagacggcatttggtccacagacatccttaaggaccaaaaggagccgaagaataagacgtttctgcgctgtgaagcgaagaactatagtggtcgctttacttgctggtggttgacgaccatttccactgatttaaccttttcggtaaagagttctcgcgggagttccgacccacagggcgtgacttgtggcgcagccacactttcggcggaacgcgttcgtggggacaataaggaatacgaatattcggtcgagtgtcaggaagattcagcttgccctgccgctgaggagtcacttccgattgaagtgatggttgacgccgtgcacaaattaaagtatgaaaattacacgtcatctttctttatccgtgacattattaagcccgacccgccaaagaatctgcagcttaaacccctgaagaacagccgccaggtggaagtaagctgggaatatcctgacacctggtccactccgcattcgtatttctcgttgacgttttgtgttcaggtgcagggaaagagcaagcgcgaaaagaaggatcgcgtctttacagacaaaacgtccgcgacggttatttgtcgtaagaatgctagtatctctgttcgcgctcaggaccgttattactcatctagttggtcggagtgggcctcggttccctgctctgggggtggaggatcgggtggaggtggctcgggaggtggcggctcccgtaatttaccggtggctactcctgacccagggatgttcccgtgcttgcaccatagccaaaacttacttcgcgctgtcagcaacatgcttcagaaagcacgtcaaacgcttgagttttacccgtgtactagcgaagagatcgatcacgaggacattaccaaagacaaaacctccaccgtcgaggcctgccttccacttgaactgacgaaaaatgagtcatgcttaaattctcgtgaaacctccttcattactaacggatcgtgcctggcctcgcgcaagacttcgttcatgatggcattatgcttgtcgtctatttatgaagaccttaaaatgtatcaagtggagttcaagacgatgaatgcaaaacttcttatggacccgaagcgtcaaatcttcttagaccaaaacatgttggccgtgatcgatgaactgatgcaagccttgaattttaattcggaaactgtaccgcaaaaatcttctcttgaagaaccggatttctataagaccaaaattaaactttgtattttacttcacgctttccgcatccgtgcagtaactatcgaccgcgtaatgagttaccttaacgcctcgggtggcgagctcggtggcagtggtaagcctatccctaaccctctcctcggcctcgattctacgggatccggtcatcaccaccatcaccatcaccat

SEQ ID NO: 1261 - DNA, 1767 bp, Artificial Sequence
  Description of Artificial Sequence: Synthetic polynucleotide
atgatgattaccttacgcaagttgccccttgcggtagccgttgctgctggtgtgatgtccgcgcaagcaatggctgtcgactataaggatgacgacgacaagcaattgggcggtggcatctgggagcttaagaaggacgtgtatgtagtggagttagactggtatccagatgcccccggagagatggtggtcttaacatgtgacactccagaggaggacgggattacctggacacttgaccagtcaagcgaggtattgggttctggaaagacgcttactattcaagtcaaagaatttggggatgccgggcagtatacatgtcacaagggcggcgaagttctgtcgcactccttacttttgttacacaaaaaagaagacggcatttggtccacagacatccttaaggaccaaaaggagccgaagaataagacgtttctgcgctgtgaagcgaagaactatagtggtcgctttacttgctggtggttgacgaccatttccactgatttaaccttttcggtaaagagttctcgcgggagttccgacccacagggcgtgacttgtggcgcagccacactttcggcggaacgcgttcgtggggacaataaggaatacgaatattcggtcgagtgtcaggaagattcagcttgccctgccgctgaggagtcacttccgattgaagtgatggttgacgccgtgcacaaattaaagtatgaaaattacacgtcatctttctttatccgtgacattattaagcccgacccgccaaagaatctgcagcttaaacccctgaagaacagccgccaggtggaagtaagctgggaatatcctgacacctggtccactccgcattcgtatttctcgttgacgttttgtgttcaggtgcagggaaagagcaagcgcgaaaagaaggatcgcgtctttacagacaaaacgtccgcgacggttatttgtcgtaagaatgctagtatctctgttcgcgctcaggaccgttattactcatctagttggtcggagtgggcctcggttccctgctctgggggtggaggatcgggtggaggtggctcgggaggtggcggctcccgtaatttaccggtggctactcctgacccagggatgttcccgtgcttgcaccatagccaaaacttacttcgcgctgtcagcaacatgcttcagaaagcacgtcaaacgcttgagttttacccgtgtactagcgaagagatcgatcacgaggacattaccaaagacaaaacctccaccgtcgaggcctgccttccacttgaactgacgaaaaatgagtcatgcttaaattctcgtgaaacctccttcattactaacggatcgtgcctggcctcgcgcaagacttcgttcatgatggcattatgcttgtcgtctatttatgaagaccttaaaatgtatcaagtggagttcaagacgatgaatgcaaaacttcttatggacccgaagcgtcaaatcttcttagaccaaaacatgttggccgtgatcgatgaactgatgcaagccttgaattttaattcggaaactgtaccgcaaaaatcttctcttgaagaaccggatttctataagaccaaaattaaactttgtattttacttcacgctttccgcatccgtgcagtaactatcgaccgcgtaatgagttaccttaacgcctcgggtggcgagctcggtggcagtggtaagcctatccctaaccctctcctcggcctcgattctacgggatccggtcatcaccaccatcaccatcaccat

SEQ ID NO: 1262 - DNA, 1758 bp, Artificial Sequence
  Description of Artificial Sequence: Synthetic polynucleotide
atgaaatatcttcttccaacggctgctgctggtttattgcttcttgccgcccagcctgcgatggctgtcgactataaggatgacgacgacaagcaattgggcggtggcatctgggagcttaagaaggacgtgtatgtagtggagttagactggtatccagatgcccccggagagatggtggtcttaacatgtgacactccagaggaggacgggattacctggacacttgaccagtcaagcgaggtattgggttctggaaagacgcttactattcaagtcaaagaatttggggatgccgggcagtatacatgtcacaagggcggcgaagttctgtcgcactccttacttttgttacacaaaaaagaagacggcatttggtccacagacatccttaaggaccaaaaggagccgaagaataagacgtttctgcgctgtgaagcgaagaactatagtggtcgctttacttgctggtggttgacgaccatttccactgatttaaccttttcggtaaagagttctcgcgggagttccgacccacagggcgtgacttgtggcgcagccacactttcggcggaacgcgttcgtggggacaataaggaatacgaatattcggtcgagtgtcaggaagattcagcttgccctgccgctgaggagtcacttccgattgaagtgatggttgacgccgtgcacaaattaaagtatgaaaattacacgtcatctttctttatccgtgacattattaagcccgacccgccaaagaatctgcagcttaaacccctgaagaacagccgccaggtggaagtaagctgggaatatcctgacacctggtccactccgcattcgtatttctcgttgacgttttgtgttcaggtgcagggaaagagcaagcgcgaaaagaaggatcgcgtctttacagacaaaacgtccgcgacggttatttgtcgtaagaatgctagtatctctgttcgcgctcaggaccgttattactcatctagttggtcggagtgggcctcggttccctgctctgggggtggaggatcgggtggaggtggctcgggaggtggcggctcccgtaatttaccggtggctactcctgacccagggatgttcccgtgcttgcaccatagccaaaacttacttcgcgctgtcagcaacatgcttcagaaagcacgtcaaacgcttgagttttacccgtgtactagcgaagagatcgatcacgaggacattaccaaagacaaaacctccaccgtcgaggcctgccttccacttgaactgacgaaaaatgagtcatgcttaaattctcgtgaaacctccttcattactaacggatcgtgcctggcctcgcgcaagacttcgttcatgatggcattatgcttgtcgtctatttatgaagaccttaaaatgtatcaagtggagttcaagacgatgaatgcaaaacttcttatggacccgaagcgtcaaatcttcttagaccaaaacatgttggccgtgatcgatgaactgatgcaagccttgaattttaattcggaaactgtaccgcaaaaatcttctcttgaagaaccggatttctataagaccaaaattaaactttgtattttacttcacgctttccgcatccgtgcagtaactatcgaccgcgtaatgagttaccttaacgcctcgggtggcgagctcggtggcagtggtaagcctatccctaaccctctcctcggcctcgattctacgggatccggtcatcaccaccatcaccatcaccat

SEQ ID NO: 1263 - DNA, 1554 bp, Artificial Sequence
  Description of Artificial Sequence: Synthetic polynucleotide
atctgggagcttaagaaggacgtgtatgtagtggagttagactggtatccagatgcccccggagagatggtggtcttaacatgtgacactccagaggaggacgggattacctggacacttgaccagtcaagcgaggtattgggttctggaaagacgcttactattcaagtcaaagaatttggggatgccgggcagtatacatgtcacaagggcggcgaagttctgtcgcactccttacttttgttacacaaaaaagaagacggcatttggtccacagacatccttaaggaccaaaaggagccgaagaataagacgtttctgcgctgtgaagcgaagaactatagtggtcgctttacttgctggtggttgacgaccatttccactgatttaaccttttcggtaaagagttctcgcgggagttccgacccacagggcgtgacttgtggcgcagccacactttcggcggaacgcgttcgtggggacaataaggaatacgaatattcggtcgagtgtcaggaagattcagcttgccctgccgctgaggagtcacttccgattgaagtgatggttgacgccgtgcacaaattaaagtatgaaaattacacgtcatctttctttatccgtgacattattaagcccgacccgccaaagaatctgcagcttaaacccctgaagaacagccgccaggtggaagtaagctgggaatatcctgacacctggtccactccgcattcgtatttctcgttgacgttttgtgttcaggtgcagggaaagagcaagcgcgaaaagaaggatcgcgtctttacagacaaaacgtccgcgacggttatttgtcgtaagaatgctagtatctctgttcgcgctcaggaccgttattactcatctagttggtcggagtgggcctcggttccctgctctgggggtggaggatcgggtggaggtggctcgggaggtggcggctcccgtaatttaccggtggctactcctgacccagggatgttcccgtgcttgcaccatagccaaaacttacttcgcgctgtcagcaacatgcttcagaaagcacgtcaaacgcttgagttttacccgtgtactagcgaagagatcgatcacgaggacattaccaaagacaaaacctccaccgtcgaggcctgccttccacttgaactgacgaaaaatgagtcatgcttaaattctcgtgaaacctccttcattactaacggatcgtgcctggcctcgcgcaagacttcgttcatgatggcattatgcttgtcgtctatttatgaagaccttaaaatgtatcaagtggagttcaagacgatgaatgcaaaacttcttatggacccgaagcgtcaaatcttcttagaccaaaacatgttggccgtgatcgatgaactgatgcaagccttgaattttaattcggaaactgtaccgcaaaaatcttctcttgaagaaccggatttctataagaccaaaattaaactttgtattttacttcacgctttccgcatccgtgcagtaactatcgaccgcgtaatgagttaccttaacgcctcg

SEQ ID NO: 1264 - protein, 597 aa, Artificial Sequence
  Description of Artificial Sequence: Synthetic polypeptide
MGYKMNISSLRKAFIFMGAVAALSLVNAQSALAVDYKDDDDKQLGGGIWELKKDVYVVELDWYPDAPGEMVVLTCDTPEEDGITWTLDQSSEVLGSGKTLTIQVKEFGDAGQYTCHKGGEVLSHSLLLLHKKEDGIWSTDILKDQKEPKNKTFLRCEAKNYSGRFTCWWLTTISTDLTFSVKSSRGSSDPQGVTCGAATLSAERVRGDNKEYEYSVECQEDSACPAAEESLPIEVMVDAVHKLKYENYTSSFFIRDIIKPDPPKNLQLKPLKNSRQVEVSWEYPDTWSTPHSYFSLTFCVQVQGKSKREKKDRVFTDKTSATVICRKNASISVRAQDRYYSSSWSEWASVPCSGGGGSGGGGSGGGGSRNLPVATPDPGMFPCLHHSQNLLRAVSNMLQKARQTLEFYPCTSEEIDHEDITKDKTSTVEACLPLELTKNESCLNSRETSFITNGSCLASRKTSFMMALCLSSIYEDLKMYQVEFKTMNAKLLMDPKRQIFLDQNMLAVIDELMQALNFNSETVPQKSSLEEPDFYKTKIKLCILLHAFRIRAVTIDRVMSYLNASGGELGGSGKPIPNPLLGLDSTGSGHHHHHHHH

SEQ ID NO: 1265 - protein, 583 aa, Artificial Sequence
  Description of Artificial Sequence: Synthetic polypeptide
MKKIWLALAGLVLAFSASAVDYKDDDDKQLGGGIWELKKDVYVVELDWYPDAPGEMVVLTCDTPEEDGITWTLDQSSEVLGSGKTLTIQVKEFGDAGQYTCHKGGEVLSHSLLLLHKKEDGIWSTDILKDQKEPKNKTFLRCEAKNYSGRFTCWWLTTISTDLTFSVKSSRGSSDPQGVTCGAATLSAERVRGDNKEYEYSVECQEDSACPAAEESLPIEVMVDAVHKLKYENYTSSFFIRDIIKPDPPKNLQLKPLKNSRQVEVSWEYPDTWSTPHSYFSLTFCVQVQGKSKREKKDRVFTDKTSATVICRKNASISVRAQDRYYSSSWSEWASVPCSGGGGSGGGGSGGGGSRNLPVATPDPGMFPCLHHSQNLLRAVSNMLQKARQTLEFYPCTSEEIDHEDITKDKTSTVEACLPLELTKNESCLNSRETSFITNGSCLASRKTSFMMALCLSSIYEDLKMYQVEFKTMNAKLLMDPKRQIFLDQNMLAVIDELMQALNFNSETVPQKSSLEEPDFYKTKIKLCILLHAFRIRAVTIDRVMSYLNASGGELGGSGKPIPNPLLGLDSTGSGHHHHHHHH

SEQ ID NO: 1266 - protein, 585 aa, Artificial Sequence
  Description of Artificial Sequence: Synthetic polypeptide
MKQSTIALALLPLLFTPVTKAVDYKDDDDKQLGGGIWELKKDVYVVELDWYPDAPGEMVVLTCDTPEEDGITWTLDQSSEVLGSGKTLTIQVKEFGDAGQYTCHKGGEVLSHSLLLLHKKEDGIWSTDILKDQKEPKNKTFLRCEAKNYSGRFTCWWLTTISTDLTFSVKSSRGSSDPQGVTCGAATLSAERVRGDNKEYEYSVECQEDSACPAAEESLPIEVMVDAVHKLKYENYTSSFFIRDIIKPDPPKNLQLKPLKNSRQVEVSWEYPDTWSTPHSYFSLTFCVQVQGKSKREKKDRVFTDKTSATVICRKNASISVRAQDRYYSSSWSEWASVPCSGGGGSGGGGSGGGGSRNLPVATPDPGMFPCLHHSQNLLRAVSNMLQKARQTLEFYPCTSEEIDHEDITKDKTSTVEACLPLELTKNESCLNSRETSFITNGSCLASRKTSFMMALCLSSIYEDLKMYQVEFKTMNAKLLMDPKRQIFLDQNMLAVIDELMQALNFNSETVPQKSSLEEPDFYKTKIKLCILLHAFRIRAVTIDRVMSYLNASGGELGGSGKPIPNPLLGLDSTGSGHHHHHHHH

SEQ ID NO: 1267 - protein, 585 aa, Artificial Sequence
  Description of Artificial Sequence: Synthetic polypeptide
MKQALRVAFGFLILWASVLHAVDYKDDDDKQLGGGIWELKKDVYVVELDWYPDAPGEMVVLTCDTPEEDGITWTLDQSSEVLGSGKTLTIQVKEFGDAGQYTCHKGGEVLSHSLLLLHKKEDGIWSTDILKDQKEPKNKTFLRCEAKNYSGRFTCWWLTTISTDLTFSVKSSRGSSDPQGVTCGAATLSAERVRGDNKEYEYSVECQEDSACPAAEESLPIEVMVDAVHKLKYENYTSSFFIRDIIKPDPPKNLQLKPLKNSRQVEVSWEYPDTWSTPHSYFSLTFCVQVQGKSKREKKDRVFTDKTSATVICRKNASISVRAQDRYYSSSWSEWASVPCSGGGGSGGGGSGGGGSRNLPVATPDPGMFPCLHHSQNLLRAVSNMLQKARQTLEFYPCTSEEIDHEDITKDKTSTVEACLPLELTKNESCLNSRETSFITNGSCLASRKTSFMMALCLSSIYEDLKMYQVEFKTMNAKLLMDPKRQIFLDQNMLAVIDELMQALNFNSETVPQKSSLEEPDFYKTKIKLCILLHAFRIRAVTIDRVMSYLNASGGELGGSGKPIPNPLLGLDSTGSGHHHHHHHH

SEQ ID NO: 1268 - protein, 590 aa, Artificial Sequence
  Description of Artificial Sequence: Synthetic polypeptide
MKIKTGARILALSALTTMMFSASALAVDYKDDDDKQLGGGIWELKKDVYVVELDWYPDAPGEMVVLTCDTPEEDGITWTLDQSSEVLGSGKTLTIQVKEFGDAGQYTCHKGGEVLSHSLLLLHKKEDGIWSTDILKDQKEPKNKTFLRCEAKNYSGRFTCWWLTTISTDLTFSVKSSRGSSDPQGVTCGAATLSAERVRGDNKEYEYSVECQEDSACPAAEESLPIEVMVDAVHKLKYENYTSSFFIRDIIKPDPPKNLQLKPLKNSRQVEVSWEYPDTWSTPHSYFSLTFCVQVQGKSKREKKDRVFTDKTSATVICRKNASISVRAQDRYYSSSWSEWASVPCSGGGGSGGGGSGGGGSRNLPVATPDPGMFPCLHHSQNLLRAVSNMLQKARQTLEFYPCTSEEIDHEDITKDKTSTVEACLPLELTKNESCLNSRETSFITNGSCLASRKTSFMMALCLSSIYEDLKMYQVEFKTMNAKLLMDPKRQIFLDQNMLAVIDELMQALNFNSETVPQKSSLEEPDFYKTKIKLCILLHAFRIRAVTIDRVMSYLNASGGELGGSGKPIPNPLLGLDSTGSGHHHHHHHH

SEQ ID NO: 1269 - protein, 587 aa, Artificial Sequence
  Description of Artificial Sequence: Synthetic polypeptide
MNKKVLTLSAVMASMLFGAAAHAVDYKDDDDKQLGGGIWELKKDVYVVELDWYPDAPGEMVVLTCDTPEEDGITWTLDQSSEVLGSGKTLTIQVKEFGDAGQYTCHKGGEVLSHSLLLLHKKEDGIWSTDILKDQKEPKNKTFLRCEAKNYSGRFTCWWLTTISTDLTFSVKSSRGSSDPQGVTCGAATLSAERVRGDNKEYEYSVECQEDSACPAAEESLPIEVMVDAVHKLKYENYTSSFFIRDIIKPDPPKNLQLKPLKNSRQVEVSWEYPDTWSTPHSYFSLTFCVQVQGKSKREKKDRVFTDKTSATVICRKNASISVRAQDRYYSSSWSEWASVPCSGGGGSGGGGSGGGGSRNLPVATPDPGMFPCLHHSQNLLRAVSNMLQKARQTLEFYPCTSEEIDHEDITKDKTSTVEACLPLELTKNESCLNSRETSFITNGSCLASRKTSFMMALCLSSIYEDLKMYQVEFKTMNAKLLMDPKRQIFLDQNMLAVIDELMQALNFNSETVPQKSSLEEPDFYKTKIKLCILLHAFRIRAVTIDRVMSYLNASGGELGGSGKPIPNPLLGLDSTGSGHHHHHHHH

SEQ ID NO: 1270 - protein, 586 aa, Artificial Sequence
  Description of Artificial Sequence: Synthetic polypeptide
MMKRNILAVIVPALLVAGTANAVDYKDDDDKQLGGGIWELKKDVYVVELDWYPDAPGEMVVLTCDTPEEDGITWTLDQSSEVLGSGKTLTIQVKEFGDAGQYTCHKGGEVLSHSLLLLHKKEDGIWSTDILKDQKEPKNKTFLRCEAKNYSGRFTCWWLTTISTDLTFSVKSSRGSSDPQGVTCGAATLSAERVRGDNKEYEYSVECQEDSACPAAEESLPIEVMVDAVHKLKYENYTSSFFIRDIIKPDPPKNLQLKPLKNSRQVEVSWEYPDTWSTPHSYFSLTFCVQVQGKSKREKKDRVFTDKTSATVICRKNASISVRAQDRYYSSSWSEWASVPCSGGGGSGGGGSGGGGSRNLPVATPDPGMFPCLHHSQNLLRAVSNMLQKARQTLEFYPCTSEEIDHEDITKDKTSTVEACLPLELTKNESCLNSRETSFITNGSCLASRKTSFMMALCLSSIYEDLKMYQVEFKTMNAKLLMDPKRQIFLDQNMLAVIDELMQALNFNSETVPQKSSLEEPDFYKTKIKLCILLHAFRIRAVTIDRVMSYLNASGGELGGSGKPIPNPLLGLDSTGSGHHHHHHHH

SEQ ID NO: 1271 - protein, 585 aa, Artificial Sequence
  Description of Artificial Sequence: Synthetic polypeptide
MKKTAIAIAVALAGFATVAQAVDYKDDDDKQLGGGIWELKKDVYVVELDWYPDAPGEMVVLTCDTPEEDGITWTLDQSSEVLGSGKTLTIQVKEFGDAGQYTCHKGGEVLSHSLLLLHKKEDGIWSTDILKDQKEPKNKTFLRCEAKNYSGRFTCWWLTTISTDLTFSVKSSRGSSDPQGVTCGAATLSAERVRGDNKEYEYSVECQEDSACPAAEESLPIEVMVDAVHKLKYENYTSSFFIRDIIKPDPPKNLQLKPLKNSRQVEVSWEYPDTWSTPHSYFSLTFCVQVQGKSKREKKDRVFTDKTSATVICRKNASISVRAQDRYYSSSWSEWASVPCSGGGGSGGGGSGGGGSRNLPVATPDPGMFPCLHHSQNLLRAVSNMLQKARQTLEFYPCTSEEIDHEDITKDKTSTVEACLPLELTKNESCLNSRETSFITNGSCLASRKTSFMMALCLSSIYEDLKMYQVEFKTMNAKLLMDPKRQIFLDQNMLAVIDELMQALNFNSETVPQKSSLEEPDFYKTKIKLCILLHAFRIRAVTIDRVMSYLNASGGELGGSGKPIPNPLLGLDSTGSGHHHHHHHH

SEQ ID NO: 1272 - protein, 582 aa, Artificial Sequence
  Description of Artificial Sequence: Synthetic polypeptide
MRVLLFLLLSLFMLPAFSVDYKDDDDKQLGGGIWELKKDVYVVELDWYPDAPGEMVVLTCDTPEEDGITWTLDQSSEVLGSGKTLTIQVKEFGDAGQYTCHKGGEVLSHSLLLLHKKEDGIWSTDILKDQKEPKNKTFLRCEAKNYSGRFTCWWLTTISTDLTFSVKSSRGSSDPQGVTCGAATLSAERVRGDNKEYEYSVECQEDSACPAAEESLPIEVMVDAVHKLKYENYTSSFFIRDIIKPDPPKNLQLKPLKNSRQVEVSWEYPDTWSTPHSYFSLTFCVQVQGKSKREKKDRVFTDKTSATVICRKNASISVRAQDRYYSSSWSEWASVPCSGGGGSGGGGSGGGGSRNLPVATPDPGMFPCLHHSQNLLRAVSNMLQKARQTLEFYPCTSEEIDHEDITKDKTSTVEACLPLELTKNESCLNSRETSFITNGSCLASRKTSFMMALCLSSIYEDLKMYQVEFKTMNAKLLMDPKRQIFLDQNMLAVIDELMQALNFNSETVPQKSSLEEPDFYKTKIKLCILLHAFRIRAVTIDRVMSYLNASGGELGGSGKPIPNPLLGLDSTGSGHHHHHHHH

SEQ ID NO: 1273 - protein, 589 aa, Artificial Sequence
  Description of Artificial Sequence: Synthetic polypeptide
MMITLRKLPLAVAVAAGVMSAQAMAVDYKDDDDKQLGGGIWELKKDVYVVELDWYPDAPGEMVVLTCDTPEEDGITWTLDQSSEVLGSGKTLTIQVKEFGDAGQYTCHKGGEVLSHSLLLLHKKEDGIWSTDILKDQKEPKNKTFLRCEAKNYSGRFTCWWLTTISTDLTFSVKSSRGSSDPQGVTCGAATLSAERVRGDNKEYEYSVECQEDSACPAAEESLPIEVMVDAVHKLKYENYTSSFFIRDIIKPDPPKNLQLKPLKNSRQVEVSWEYPDTWSTPHSYFSLTFCVQVQGKSKREKKDRVFTDKTSATVICRKNASISVRAQDRYYSSSWSEWASVPCSGGGGSGGGGSGGGGSRNLPVATPDPGMFPCLHHSQNLLRAVSNMLQKARQTLEFYPCTSEEIDHEDITKDKTSTVEACLPLELTKNESCLNSRETSFITNGSCLASRKTSFMMALCLSSIYEDLKMYQVEFKTMNAKLLMDPKRQIFLDQNMLAVIDELMQALNFNSETVPQKSSLEEPDFYKTKIKLCILLHAFRIRAVTIDRVMSYLNASGGELGGSGKPIPNPLLGLDSTGSGHHHHHHHH

SEQ ID NO: 1274 - protein, 586 aa, Artificial Sequence
  Description of Artificial Sequence: Synthetic polypeptide
MKYLLPTAAAGLLLLAAQPAMAVDYKDDDDKQLGGGIWELKKDVYVVELDWYPDAPGEMVVLTCDTPEEDGITWTLDQSSEVLGSGKTLTIQVKEFGDAGQYTCHKGGEVLSHSLLLLHKKEDGIWSTDILKDQKEPKNKTFLRCEAKNYSGRFTCWWLTTISTDLTFSVKSSRGSSDPQGVTCGAATLSAERVRGDNKEYEYSVECQEDSACPAAEESLPIEVMVDAVHKLKYENYTSSFFIRDIIKPDPPKNLQLKPLKNSRQVEVSWEYPDTWSTPHSYFSLTFCVQVQGKSKREKKDRVFTDKTSATVICRKNASISVRAQDRYYSSSWSEWASVPCSGGGGSGGGGSGGGGSRNLPVATPDPGMFPCLHHSQNLLRAVSNMLQKARQTLEFYPCTSEEIDHEDITKDKTSTVEACLPLELTKNESCLNSRETSFITNGSCLASRKTSFMMALCLSSIYEDLKMYQVEFKTMNAKLLMDPKRQIFLDQNMLAVIDELMQALNFNSETVPQKSSLEEPDFYKTKIKLCILLHAFRIRAVTIDRVMSYLNASGGELGGSGKPIPNPLLGLDSTGSGHHHHHHHH

SEQ ID NO: 1275 - protein, 518 aa, Artificial Sequence
  Description of Artificial Sequence: Synthetic polypeptide
IWELKKDVYVVELDWYPDAPGEMVVLTCDTPEEDGITWTLDQSSEVLGSGKTLTIQVKEFGDAGQYTCHKGGEVLSHSLLLLHKKEDGIWSTDILKDQKEPKNKTFLRCEAKNYSGRFTCWWLTTISTDLTFSVKSSRGSSDPQGVTCGAATLSAERVRGDNKEYEYSVECQEDSACPAAEESLPIEVMVDAVHKLKYENYTSSFFIRDIIKPDPPKNLQLKPLKNSRQVEVSWEYPDTWSTPHSYFSLTFCVQVQGKSKREKKDRVFTDKTSATVICRKNASISVRAQDRYYSSSWSEWASVPCSGGGGSGGGGSGGGGSRNLPVATPDPGMFPCLHHSQNLLRAVSNMLQKARQTLEFYPCTSEEIDHEDITKDKTSTVEACLPLELTKNESCLNSRETSFITNGSCLASRKTSFMMALCLSSIYEDLKMYQVEFKTMNAKLLMDPKRQIFLDQNMLAVIDELMQALNFNSETVPQKSSLEEPDFYKTKIKLCILLHAFRIRAVTIDRVMSYLNAS

SEQ ID NO: 1276 - DNA, 711 bp, Artificial Sequence
  Description of Artificial Sequence: Synthetic polynucleotide
atggggtacaaaatgaacattagctcgcttcgcaaagcattcatttttatgggggctgttgcagctttaagccttgtcaatgcccagtcagcgcttgccatgatcacttgtccgccccccatgtctgtggaacacgcggatatttgggtaaagagctactcactgtacagccgtgaacgttatatttgtaactccggcttcaaacgcaaagcaggaacttcatcactgacggagtgtgttttaaataaagctactaacgtcgcgcactggactactccctcattgaagtgcatccgtgatcctgctctgggtggcgggggtagcggcgggggtggaagcgggggtggagggtctggaggaggtgggtctaactgggtgaatgttatctcagatttaaagaaaattgaagacctgatccaatctatgcacatcgacgctactctgtatacagaatcagatgtacatccttcgtgtaaagtgaccgcgatgaagtgttttttgcttgagctgcaagtaatttcccttgagtccggggacgcttcaatccatgacacggtcgagaacctgatcattctggcaaacaatagtttatcatcgaacggtaatgttaccgaatcgggttgcaaagaatgcgaagagttagaggaaaagaacattaaagaatttttgcaatccttcgttcacattgtgcagatgttcattaatacatcg

SEQ ID NO: 1277 - DNA, 666 bp, Artificial Sequence
  Description of Artificial Sequence: Synthetic polynucleotide
atgcgcgtgttattgttcttgctgctgagcttgtttatgttaccagctttcagtatgatcacttgtccgccccccatgtctgtggaacacgcggatatttgggtaaagagctactcactgtacagccgtgaacgttatatttgtaactccggcttcaaacgcaaagcaggaacttcatcactgacggagtgtgttttaaataaagctactaacgtcgcgcactggactactccctcattgaagtgcatccgtgatcctgctctgggtggcgggggtagcggcgggggtggaagcgggggtggagggtctggaggaggtgggtctaactgggtgaatgttatctcagatttaaagaaaattgaagacctgatccaatctatgcacatcgacgctactctgtatacagaatcagatgtacatccttcgtgtaaagtgaccgcgatgaagtgttttttgcttgagctgcaagtaatttcccttgagtccggggacgcttcaatccatgacacggtcgagaacctgatcattctggcaaacaatagtttatcatcgaacggtaatgttaccgaatcgggttgcaaagaatgcgaagagttagaggaaaagaacattaaagaatttttgcaatccttcgttcacattgtgcagatgttcattaatacatcg

SEQ ID NO: 1278 - DNA, 678 bp, Artificial Sequence
  Description of Artificial Sequence: Synthetic polynucleotide
atgaaatatcttcttccaacggctgctgctggtttattgcttcttgccgcccagcctgcgatggctatgatcacttgtccgccccccatgtctgtggaacacgcggatatttgggtaaagagctactcactgtacagccgtgaacgttatatttgtaactccggcttcaaacgcaaagcaggaacttcatcactgacggagtgtgttttaaataaagctactaacgtcgcgcactggactactccctcattgaagtgcatccgtgatcctgctctgggtggcgggggtagcggcgggggtggaagcgggggtggagggtctggaggaggtgggtctaactgggtgaatgttatctcagatttaaagaaaattgaagacctgatccaatctatgcacatcgacgctactctgtatacagaatcagatgtacatccttcgtgtaaagtgaccgcgatgaagtgttttttgcttgagctgcaagtaatttcccttgagtccggggacgcttcaatccatgacacggtcgagaacctgatcattctggcaaacaatagtttatcatcgaacggtaatgttaccgaatcgggttgcaaagaatgcgaagagttagaggaaaagaacattaaagaatttttgcaatccttcgttcacattgtgcagatgttcattaatacatcg

SEQ ID NO: 1279 - DNA, 612 bp, Artificial Sequence
  Description of Artificial Sequence: Synthetic polynucleotide
atgatcacttgtccgccccccatgtctgtggaacacgcggatatttgggtaaagagctactcactgtacagccgtgaacgttatatttgtaactccggcttcaaacgcaaagcaggaacttcatcactgacggagtgtgttttaaataaagctactaacgtcgcgcactggactactccctcattgaagtgcatccgtgatcctgctctgggtggcgggggtagcggcgggggtggaagcgggggtggagggtctggaggaggtgggtctaactgggtgaatgttatctcagatttaaagaaaattgaagacctgatccaatctatgcacatcgacgctactctgtatacagaatcagatgtacatccttcgtgtaaagtgaccgcgatgaagtgttttttgcttgagctgcaagtaatttcccttgagtccggggacgcttcaatccatgacacggtcgagaacctgatcattctggcaaacaatagtttatcatcgaacggtaatgttaccgaatcgggttgcaaagaatgcgaagagttagaggaaaagaacattaaagaatttttgcaatccttcgttcacattgtgcagatgttcattaatacatcg

SEQ ID NO: 1280 - protein, 20 aa, Artificial Sequence
  Description of Artificial Sequence: Synthetic peptide
GGGGSGGGGSGGGGSGGGGS

SEQ ID NO: 1281 - protein, 70 aa, Homo sapiens
MITCPPPMSVEHADIWVKSYSLYSRERYICNSGFKRKAGTSSLTECVLNKATNVAHWTTPSLKCIRDPAL

SEQ ID NO: 1282 - protein, 237 aa, Artificial Sequence
  Description of Artificial Sequence: Synthetic polypeptide
MGYKMNISSLRKAFIFMGAVAALSLVNAQSALAMITCPPPMSVEHADIWVKSYSLYSRERYICNSGFKRKAGTSSLTECVLNKATNVAHWTTPSLKCIRDPALGGGGSGGGGSGGGGSGGGGSNWVNVISDLKKIEDLIQSMHIDATLYTESDVHPSCKVTAMKCFLLELQVISLESGDASIHDTVENLIILANNSLSSNGNVTESGCKECEELEEKNIKEFLQSFVHIVQMFINTS

SEQ ID NO: 1283 - protein, 222 aa, Artificial Sequence
  Description of Artificial Sequence: Synthetic polypeptide
MRVLLFLLLSLFMLPAFSMITCPPPMSVEHADIWVKSYSLYSRERYICNSGFKRKAGTSSLTECVLNKATNVAHWTTPSLKCIRDPALGGGGSGGGGSGGGGSGGGGSNWVNVISDLKKIEDLIQSMHIDATLYTESDVHPSCKVTAMKCFLLELQVISLESGDASIHDTVENLIILANNSLSSNGNVTESGCKECEELEEKNIKEFLQSFVHIVQMFINTS

SEQ ID NO: 1284 - protein, 226 aa, Artificial Sequence
  Description of Artificial Sequence: Synthetic polypeptide
MKYLLPTAAAGLLLLAAQPAMAMITCPPPMSVEHADIWVKSYSLYSRERYICNSGFKRKAGTSSLTECVLNKATNVAHWTTPSLKCIRDPALGGGGSGGGGSGGGGSGGGGSNWVNVISDLKKIEDLIQSMHIDATLYTESDVHPSCKVTAMKCFLLELQVISLESGDASIHDTVENLIILANNSLSSNGNVTESGCKECEELEEKNIKEFLQSFVHIVQMFINTS

SEQ ID NO: 1285 - protein, 204 aa, Artificial Sequence
  Description of Artificial Sequence: Synthetic polypeptide
MITCPPPMSVEHADIWVKSYSLYSRERYICNSGFKRKAGTSSLTECVLNKATNVAHWTTPSLKCIRDPALGGGGSGGGGSGGGGSGGGGSNWVNVISDLKKIEDLIQSMHIDATLYTESDVHPSCKVTAMKCFLLELQVISLESGDASIHDTVENLIILANNSLSSNGNVTESGCKECEELEEKNIKEFLQSFVHIVQMFINTS

SEQ ID NO: 1286 - DNA, 285 bp, Artificial Sequence
  Description of Artificial Sequence: Synthetic polynucleotide
atgaagcaaagtacgatcgcccttgcgctgttgccccttcttttcacgcccgtcaccaaggcagtgcccctgagccgcaccgtgcgttgtacgtgtatctccatctcaaaccagccggtaaacccgcgtagtttagaaaaactggagattatcccagccagccagttttgcccgcgcgttgagattattgcgaccatgaagaaaaaaggggaaaaacgttgccttaatccagaaagtaaggctatcaaaaacctgttgaaagctgtctcgaaagagcgttcctaa

SEQ ID NO: 1287 - DNA, 20 bp, Artificial Sequence
  Description of Artificial Sequence: Synthetic oligonucleotide
tatatatatatatatatata

SEQ ID NO: 1288 - DNA, 18 bp, Artificial Sequence
  Description of Artificial Sequence: Synthetic oligonucleotide
tatatatatatatatata

SEQ ID NO: 1289 - DNA, 10 bp, Artificial Sequence
  Description of Artificial Sequence: Synthetic oligonucleotide
cccccccccc

SEQ ID NO: 1290 - DNA, 12 bp, Artificial Sequence
  Description of Artificial Sequence: Synthetic oligonucleotide
cccccccccccc

SEQ ID NO: 1291 - DNA, 222 bp, Homo sapiens; identical to SEQ ID NO: 1148
